(19) United States
(12) Patent Application Publication
(10) Pub. No.: US 2018/0291068 A1
(43) Pub. Date: Oct. 11, 2018

(54) PESTICIDAL GENES AND METHODS OF USE

(71) Applicant: AGBIOME, INC., Durham, NC (US)

(72) Inventors: Jessica Parks, Raleigh, NC (US); Kira Bulazel Roberts, Bahama, NC (US); Rebecca E. Thayer, Morrisville, NC (US)

(73) Assignee: AGBIOME, INC., Durham, NC (US)

(21) Appl. No.: 15/882,467

(22) Filed: Jan. 29, 2018

Related U.S. Application Data
(60) Provisional application No. 62/451,914, filed on Jan. 30, 2017.
(60) Provisional application No. 62/476,918, filed on Mar. 27, 2017.
(60) Provisional application No. 62/543,545, filed on Aug. 10, 2017.

(51) Int. Cl. C07K 14/305; C12N 15/82; A01N 63/02; C12N 15/10

(52) U.S. Cl. CPC C07K 14/305; C12N 15/8286; C12N 15/1086; C12N 15/8261; A01N 63/02

(57) ABSTRACT

Compositions having pesticidal activity and methods for their use are provided. Compositions include isolated and recombinant polypeptide sequences having pesticidal activity, recombinant and synthetic nucleic acid molecules encoding the pesticidal polypeptides, DNA constructs comprising the nucleic acid molecules, vectors comprising the nucleic acid molecules, host cells comprising the vectors, and antibodies to the pesticidal polypeptides. Nucleotide sequences encoding the polypeptides provided herein can be used in DNA constructs or expression cassettes for transformation and expression in organisms of interest, including microorganisms and plants. The compositions and methods provided herein are useful for the production of organisms with enhanced pest resistance or tolerance. Transgenic plants and seeds comprising a nucleotide sequence that encodes a pesticidal protein of the invention are also provided. Such plants are resistant to insects and other pests. Methods are provided for producing the various polypeptides disclosed herein, and for using those polypeptides for controlling or killing a pest. Methods and kits for detecting polypeptides of the invention in a sample are also included.

### FIELD OF THE INVENTION

[0001] The invention is drawn to methods and compositions for controlling pests, particularly plant pests.

### REFERENCE TO A SEQUENCE LISTING SUBMITTED AS A TEXT FILE VIA EFS-WEB

[0002] The official copy of the sequence listing is submitted electronically via EFS-Web as an ASCII formatted sequence listing with a file named A101100_1030US_00027_1_SeqList.txt, created on Jan. 26, 2018, and having a size of 1.89 MB and is filed concurrently with the specification. The sequence listing contained in this ASCII formatted document is part of the specification and is herein incorporated by reference in its entirety.

### BACKGROUND

[0003] Pests, plant diseases, and weeds can be serious threats to crops. Losses due to pests and diseases have been estimated at 37% of the agricultural production worldwide, with 13% due to insects, bacteria and other organisms.

[0004] Toxins are virulence determinants that play an important role in microbial pathogenicity and/or evasion of the host immune response. Toxins from the gram-positive bacterium Bacillus, particularly Bacillus thuringensis, have been used as insecticidal proteins. Current strategies use the genes expressing these toxins to produce transgenic crops. Transgenic crops expressing insecticidal protein toxins are used to combat crop damage from insects.

[0005] While the use of Bacillus toxins has been successful in controlling insects, resistance to Bt toxins has developed in some target pests in many parts of the world where such toxins have been used intensively. One way of solving this problem is sowing Bt crops with alternating rows of regular non Bt crops (refuge). An alternative method to avoid or slow down development of insect resistance is stacking insecticidal genes with different modes of action against insects in transgenic plants. The current strategy of using transgenic crops expressing insecticidal protein toxins is placing increasing emphasis on the discovery of novel toxins, beyond those already derived from the bacterium Bacillus thuringiensis. These toxins may prove useful as alternatives to those derived from B. thuringiensis for deployment in insect- and pest-resistant transgenic plants. Thus, new toxin proteins are needed.

### SUMMARY

[0006] Compositions having pesticidal activity and methods for their use are provided. Compositions include isolated and recombinant polypeptide sequences having pesticidal activity, recombinant and synthetic nucleic acid molecules encoding the pesticidal polypeptides, DNA constructs comprising the nucleic acid molecules, vectors comprising the nucleic acid molecules, host cells comprising the vectors, and antibodies to the pesticidal polypeptides. Nucleotide sequences encoding the polypeptides provided herein can be used in DNA constructs or expression cassettes for transformation and expression in organisms of interest, including microorganisms and plants.

[0007] The compositions and methods provided herein are useful for the production of organisms with enhanced pest resistance or tolerance. These organisms and compositions comprising the organisms are desirable for agricultural purposes. Transgenic plants and seeds comprising a nucleotide sequence that encodes a pesticidal protein of the invention are also provided. Such plants are resistant to insects and other pests.

[0008] Methods are provided for producing the various polypeptides disclosed herein, and for using those polypeptides for controlling or killing a pest. Methods and kits for detecting polypeptides of the invention in a sample are also included.

### DETAILED DESCRIPTION OF THE INVENTION

[0009] The present inventions now will be described more fully hereinafter with reference to the accompanying drawings, in which some, but not all embodiments of the inventions are shown.

[0010] Indeed, these inventions may be embodied in many different forms and should not be construed as limited to the embodiments set forth herein; rather, these embodiments are provided so that this disclosure will satisfy applicable legal requirements. Like numbers refer to like elements throughout.

[0011] Many modifications and other embodiments of the inventions set forth herein will come to mind to one skilled in the art to which these inventions pertain having the benefit of the teachings presented in the foregoing descriptions and the associated drawings. Therefore, it is to be understood that the inventions are not to be limited to the specific embodiments disclosed and that modifications and other embodiments are intended to be included within the scope of the appended claims. Although specific terms are employed herein, they are used in a generic and descriptive sense only and not for purposes of limitation.

### I. Polynucleotides and Polypeptides

[0012] Compositions and method for conferring pesticidal activity to an organism are provided. The modified organism exhibits pesticidal resistance or tolerance. Recombinant pesticidal proteins, or polypeptides and fragments and variants thereof that retain pesticidal activity, are provided and include those set forth in SEQ ID NOs: 1, 2, 3, 4, 5, 6, 7, 8, 9, 10, 11, 12, 13, 14, 15, 16, 17, 18, 19, 20, 21, 22, 23, 24, 25, 26, 27, 28, 29, 30, 31, 32, 33, 34, 35, 36, 37, 38, 39, 40, 41, 42, 43, 44, 45, 46, 47, 48, 49, 50, 51, 52, 53, 54, 55, 56, 57, 58, 59, 60, 61, 62, 63, 64, 65, 66, 67, 68, 69, 70, 71, 72, 73, 74, 75, 76, 77, 78, 79, 80, 81, 82, 83, 84, 85, 86, 87, 88, 89, 90, 91, 92, 93, 94, 95, 96, 97, 98, 99, 100, 101, 102, 103, 104, 105, 106, 107, 108, 109, 110, 111, 112, 113, 114, 115, 116, 117, 118, 119, 120, 121, 122, 123, 124, 125, 126, 127, 128, 129, 130, 131, 132, 133, 134, 135, 136, 137, 138, 139, 140, 141, 142, 143, 144, 145, 146, 147, 148, 149, 150, 151, 152, 153, 154, 155, 156, 157, 158, 159, 160, 161, 162, 163, 164, 165, 166, 167, 168, 169, 170, 171, 172, 173, 174, 175, 176, 177, 178, 179, 180, 181, 182, 183, 184, 185, 186, 187, 188, 189, 190, 191, 192, 193, 194, 195, 196, 197, 198, 199, 200, 201, 202, 203, 204, 205, 206, 207, 208, 209, 210, 211, 212, 213, 214, 215, 216, 217, 218, 219, 220, 221, 222, 223, 224, 225, 226, 227, 228, 229, 230, 231, 232, 233, 234, 235, 236, 237, 238, 239, 240, 241, 242, 243, 244, 245, 246, 247, 248, 249, 250, 251, 252, 253, 254, 255, 256, 257, 258, 259, 260, 261, 262, 263, 264, 265, 266, 267, 268, 269, 270, 271, 272, 273, 274, 275, 276, 277, 278, 279, 280, 281, 282, 283, 284, 285, 286, 287, 288, 289, 290, 291, 292, 293, 294, 295, 296, 297, 298, 299, 300, 301, 302, 303, 304, 305, 306, 307, 308, 309, 310, 311, 312, 313, 314, 315, 316, 317, 318, 319, 320, 321, 322, 323, 324, 325, 326, 327, 328, 329, 330, 331, 332, 333, 334, 335, 336, 337, 338, 339, 340, 341, 342, 343, 344, 345, 346, 347, 348, 349, 350, 351, 352, 353, 354, 355, 356, 357, 358, 359, 360, 361, 362, 363, 364, 365, 366, 367, 368, 369, 370, 371, 372, 373, 374, 375, 376, 377, 378, 379, 380, 381, 382, 383, 384, 385, 386, 387, 388, 389, 390, 391, 392, 393, 394, 395, 396, 397, 398, 399, 400, 401, 402, 403, 404, 405, 406, 407, 408, 409, 410, 411, 412, 413, 414, 415, 416, 417, 418, 419, 420, 421, 422, 423, 424, 425, 426, 427, 428, 429, 430, 431, 432, 433, 434, 435, 436, 437, 438, 439, 440, 441, 442, 443, 444, 445, 446, 447, 448, 449, 450, 451, 452, 453, 454, 455, 456, 457, and/or 458. The pesticidal proteins are biologically active (e.g., pesticidal) against pests including insects, fungi, nematodes, and the like. Nucleotides encoding the pesticidal polypeptides, including for example, SEQ ID NOS: 1, 2, 3, 4, 5, 6, 7, 8, 9, 10, 11, 12, 13, 14, 15, 16, 17, 18, 19, 20, 21, 22, 23, 24, 25, 26, 27, 28, 29, 30, 31, 32, 33, 34, 35, 36, 37, 38, 39, 40, 41, 42, 43, 44, 45, 46, 47, 48, 49, 50, 51, 52, 53, 54, 55, 56, 57, 58, 59, 60, 61, 62, 63, 64, 65, 66, 67, 68, 69, 70, 71, 72, 73, 74, 75, 76, 77, 78, 79, 80, 81, 82, 83, 84, 85, 86, 87, 88, 89, 90, 91, 92, 93, 94, 95, 96, 97, 98, 99, 100, 101, 102, 103, 104, 105, 106, 107, 108, 109, 110, 111, 112, 113, 114, 115, 116, 117, 118, 119, 120, 121, 122, 123, 124, 125, 126, 127, 128, 129, 130, 131, 132, 133, 134, 135, 136, 137, 138, 139, 140, 141, 142, 143, 144, 145, 146, 147, 148, 149, 150, 151, 152, 153, 154, 155, 156, 157, 158, 159, 160, 161, 162, 163, 164, 165, 166, 167, 168, 169, 170, 171, 172, 173, 174, 175, 176, 177, 178, 179, 180, 181, 182, 183, 184, 185, 186, 187, 188, 189, 190, 191, 192, 193, 194, 195, 196, 197, 198, 199, 200, 201, 202, 203, 204, 205, 206, 207, 208, 209, 210, 211, 212, 213, 214, 215, 216, 217, 218, 219, 220, 221, 222, 223, 224, 225, 226, 227, 228, 229, 230, 231, 232, 233, 234, 235, 236, 237, 238, 239, 240, 241, 242, 243, 244, 245, 246, 247, 248, 249, 250, 251, 252, 253, 254, 255, 256, 257, 258, 259, 260, 261, 262, 263, 264, 265, 266, 267, 268, 269, 270, 271, 272, 273, 274, 275, 276, 277, 278, 279, 280, 281, 282, 283, 284, 285, 286, 287, 288, 289, 290, 291, 292, 293, 294, 295, 296, 297, 298, 299, 300, 301, 302, 303, 304, 305, 306, 307, 308, 309, 310, 311, 312, 313, 314, 315, 316, 317, 318, 319, 320, 321, 322, 323, 324, 325, 326, 327, 328, 329, 330, 331, 332, 333, 334, 335, 336, 337, 338, 339, 340, 341, 342, 343, 344, 345, 346, 347, 348, 349, 350, 351, 352, 353, 354, 355, 356, 357, 358, 359, 360, 361, 362, 363, 364, 365, 366, 367, 368, 369, 370, 371, 372, 373, 374, 375, 376, 377, 378, 379, 380, 381, 382, 383, 384, 385, 386, 387, 388, 389, 390, 391, 392, 393, 394, 395, 396, 397, 398, 399, 400, 401, 402, 403, 404, 405, 406, 407, 408, 409, 410, 411, 412, 413, 414, 415, 416, 417, 418, 419, 420, 421, 422, 423, 424, 425, 426, 427, 428, 429, 430, 431, 432, 433, 434, 435, 436, 437, 438, 439, 440, 441, 442, 443, 444, 445, 446, 447, 448, 449, 450, 451, 452, 453, 454, 455, 456, 457, and/or 458 or active fragments or variants thereof, can be used to produce transgenic organisms, such as plants and microorganisms. The pesticidal proteins are biologically active (for example, are pesticidal) against pests including insects, fungi, nematodes, and the like. In specific embodiments, the pesticidal polypeptides and the active variant and fragments thereof have an improved pesticidal activity when compared to other polypeptides in the art. Polynucleotides encoding the pesticidal polypeptides, including for example, SEQ ID NOS: 1, 2, 3, 4, 5, 6, 7, 8, 9, 10, 11, 12, 13, 14, 15, 16, 17, 18, 19, 20, 21, 22, 23, 24, 25, 26, 27, 28, 29, 30, 31, 32, 33, 34, 35, 36, 37, 38, 39, 40, 41, 42, 43, 44, 45, 46, 47, 48, 49, 50, 51, 52, 53, 54, 55, 56, 57, 58, 59, 60, 61, 62, 63, 64, 65, 66, 67, 68, 69, 70, 71, 72, 73, 74, 75, 76, 77, 78, 79, 80, 81, 82, 83, 84, 85, 86, 87, 88, 89, 90, 91, 92, 93, 94, 95, 96, 97, 98, 99, 100, 101, 102, 103, 104, 105, 106, 107, 108, 109, 110, 111, 112, 113, 114, 115, 116, 117, 118, 119, 120, 121, 122, 123, 124, 125, 126, 127, 128, 129, 130, 131, 132, 133, 134, 135, 136, 137, 138, 139, 140, 141, 142, 143, 144, 145, 146, 147, 148, 149, 150, 151, 152, 153, 154, 155, 156, 157, 158, 159, 160, 161, 162, 163, 164, 165, 166, 167, 168, 169, 170, 171, 172, 173, 174, 175, 176, 177, 178, 179, 180, 181, 182, 183, 184, 185, 186, 187, 188, 189, 190, 191, 192, 193, 194, 195, 196, 197, 198, 199, 200, 201, 202, 203, 204, 205, 206, 207, 208, 209, 210, 211, 212, 213, 214, 215, 216, 217, 218, 219, 220, 221, 222, 223, 224, 225, 226, 227, 228, 229, 230, 231, 232, 233, 234, 235, 236, 237, 238, 239, 240, 241, 242, 243, 244, 245, 246, 247, 248, 249, 250, 251, 252, 253, 254, 255, 256, 257, 258, 259, 260, 261, 262, 263, 264, 265, 266, 267, 268, 269, 270, 271, 272, 273, 274, 275, 276, 277, 278, 279, 280, 281, 282, 283, 284, 285, 286, 287, 288, 289, 290, 291, 292, 293, 294, 295, 296, 297, 298, 299, 300, 301, 302, 303, 304, 305, 306, 307, 308, 309, 310, 311, 312, 313, 314, 315, 316, 317, 318, 319, 320, 321, 322, 323, 324, 325, 326, 327, 328, 329, 330, 331, 332, 333, 334, 335, 336, 337, 338, 339, 340, 341, 342, 343, 344, 345, 346, 347, 348, 349, 350, 351, 352, 353, 354, 355, 356, 357, 358, 359, 360, 361, 362, 363, 364, 365, 366, 367, 368, 369, 370, 371, 372, 373, 374, 375, 376, 377, 378, 379, 380, 381, 382, 383, 384, 385, 386, 387, 388, 389, 390, 391, 392, 393, 394, 395, 396, 397, 398, 399, 400, 401, 402, 403, 404, 405, 406, 407, 408, 409, 410, 411, 412, 413, 414, 415, 416, 417, 418, 419, 420, 421, 422, 423, 424, 425, 426, 427, 428, 429, 430, 431, 432, 433, 434, 435, 436, 437, 438, 439, 440, 441, 442, 443, 444, 445, 446, 447, 448, 449, 450, 451, 452, 453, 454, 455, 456, 457, and/or 458 or active fragments or variants thereof, can be used to produce transgenic organisms, such as plants and microorganisms. The transformed organisms are characterized by genomes that comprise at least one stably incorporated DNA construct comprising a coding sequence for a pesticidal protein disclosed herein. In some embodiments, the coding sequence is operably linked to a promoter that drives expression of the encoded pesticidal polypeptide. Accordingly, transformed microorganisms, plant cells, plant tissues, plants, seeds, and plant parts are provided. A summary of various polypeptides, active variants and fragments thereof, and polynucleotides encoding the same are set forth below in Table 1. As noted in Table 1, various forms of polypeptides are provided. Full length pesticidal polypeptides, as well as, modified versions of the original full-length sequence (i.e., variants) are provided. Table 1 further denotes “CryBP1” sequences. Such sequences (SEQ ID NOS: 213, 227, and 323) comprise accessory polypeptides that can be associated with some of the toxin genes. In such instances, the CryBP1 sequences can be used alone or in combination with any of the pesticidal polypeptides provided herein. Table 1 further provides Split-Cry C-terminus polypeptides (SEQ ID NO: 131 and 201). Such sequence comprise the sequence of a downstream protein that has homology to the C-terminal end of the Cry class of toxin genes and are usually found after a Cry gene that is not full-length and is missing the expected C-terminal region.

TABLE 1
Summary of SEQ ID NOs, Gene Class, and Variants thereof

| | Full- | | | Split-Cry | | | | |
|---|---|---|---|---|---|---|---|---|
| | length | Modified | CryBP1 | C-terminus | | | | |
| | SEQ ID | SEQ ID | SEQ ID | SEQ ID | | Identity from | Similarity from | |
| Gene Name | No. | No.(s) | No. | No. | Gene Class | nearest non-APG | nearest non-APG | Homologs |
| APG00929 | 1 | | | | Bin | 55, 60, 65, 70, 75, 80, | 70, 75, 80, 85, 90, 95, | WP_028278541.1 (51.83% identity, 65.75% |
| | | | | | | 85, 90, 95, 96, 97, 98, | 96, 97, 98, 99 | similarity) |
| | | | | | | 99 | | WP_012623447.1 (48.40% identity, 62.10% |
| | | | | | | | | similarity) |
| | | | | | | | | WP_026555044.1 (44.77% identity, 58.41% |
| | | | | | | | | similarity) |
| | | | | | | | | WP_055800425.1 (44.42% identity, 58.09% |
| | | | | | | | | similarity) |
| APG00954 | 2 | | | | MTX | 70, 75, 80, 85, 90, 95, | 85, 90, 95, 96, 97, 98, | APG00408 - US_2016_0311864_A1-171 (95.97% |
| | | | | | | 96, 97, 98, 99 | 99 | identity, 98.66% similarity) |
| | | | | | | | | APG00067 - US_2016_0311864_A1-7 (82.27% |
| | | | | | | | | identity, 89.30% similarity) |
| | | | | | | | | APG00559 - US_2016_0311864_A1-191 (72.91% |
| | | | | | | | | identity, 80.60% similarity) |
| | | | | | | | | APG08589 (70.23% identity, 82.61% similarity) |
| | | | | | | | | US_2013_0227743_A1-100 (69.90% identity, 81.27% |
| | | | | | | | | similarity) |
| | | | | | | | | APG08088 (69.77% identity, 81.40% similarity) |
| | | | | | | | | APG06690 (69.08% identity, 81.25% similarity) |
| | | | | | | | | APG04720 (68.77% identity, 79.73% similarity) |
| | | | | | | | | APG00201 - US_2016_0304898_A1-193 (68.63% |
| | | | | | | | | identity, 78.76% similarity) |
| | | | | | | | | APG00006 - US_2016_0304898_A1-9 (68.3% |
| | | | | | | | | identity, 80.07% similarity) |
| APG01044 | 3 | 4 | | | MTX | 30, 35, 40, 45, 50, 55, | 50, 55, 60, 65, 70, 75, | APG00148 - US_2016_0304898_A1-170 (33.61% |
| | | | | | | 60, 65, 70, 75, 80, 85, | 80, 85, 90, 95, 96, 97, | identity, 51.54% similarity) |
| | | | | | | 90, 95, 96, 97, 98, 99 | 98, 99 | US_2013_0227743_A1-112 (29.81% identity, 45.80% |
| | | | | | | | | similarity) |
| | | | | | | | | WP_065845806.1 (28.41% identity, 46.67% |
| | | | | | | | | similarity) |
| | | | | | | | | ADK08315.1 (27.50% identity, 43.89% similarity) |
| APG01087 | 5 | 6 | | | MTX | 45, 50, 55, 60, 65, 70, | 65, 70, 75, 80, 85, 90, | WP_006918908.1 (43.44% identity, 64.38% |
| | | | | | | 75, 80, 85, 90, 95, 96, | 95, 96, 97, 98, 99 | similarity) |
| | | | | | | 97, 98, 99 | | WP_065845806.1 (40.37% identity, 60.24% |
| | | | | | | | | similarity) |
| | | | | | | | | SDW46809.1 (33.15% identity, 50.97% similarity) |
| | | | | | | | | SDX17518.1 (31.73% identity, 50.71% similarity) |
| APG01231 | 7 | 8 | | | MTX | 95, 96, 97, 98, 99 | 95, 96, 97, 98, 99 | APG00704 (93.66% identity, 95.59% similarity) |
| | | | | | | | | WP_071770709.1 (93.66% identity, 94.77% |
| | | | | | | | | similarity) |
| | | | | | | | | APG00020 - US_2016_0304898_A1-33 (82.42% |
| | | | | | | | | identity, 89.01% similarity) |
| | | | | | | | | APG00253 (82.14% identity, 87.91% similarity) |
| | | | | | | | | APG00635.1 - US_2016_0311864_A1-369 (81.32% |
| | | | | | | | | identity, 87.64% similarity) |
| | | | | | | | | APG00764 (79.58% identity, 84.03% similarity) |
| | | | | | | | | APG00268 (79.06% identity, 84.55% similarity) |
| | | | | | | | | APG08278 (78.80% identity, 84.29% similarity) |
| | | | | | | | | APG00635 - US_2016_0311864_A1-201 (77.49% |
| | | | | | | | | identity, 83.51% similarity) |
| APG01309 | 9 | | | | Cyt | 30, 35, 40, 45, 50, 55, | 40, 45, 50, 55, 60, 65, | APG00464 (97.56% identity, 98.54% similarity) |
| | | | | | | 60, 65, 70, 75, 80, 85, | 70, 75, 80, 85, 90, 95, | APG00017 - US_2016_0304898_A1-28 (95.61% |
| | | | | | | 90, 95, 96, 97, 98, 99 | 96, 97, 98, 99 | identity, 98.05% similarity) |
| | | | | | | | | APG00194.1 - US_2016_0311864_A1-251 (63.59% |
| | | | | | | | | identity, 78.16% similarity) |
| | | | | | | | | APG00194 - US_2016_0311864_A1-65 (58.74% |
| | | | | | | | | identity, 72.2% similarity) |
| | | | | | | | | Cyt2Ca1 (29.84% identity, 39.92% similarity) |
| APG01329 | 10 | 11, 12 | | | Cry32 | 95, 96, 97, 98, 99 | 96, 97, 98, 99 | US_2011_0203014-23 (93.27% identity, 95.57% |
| | | | | | | | | similarity) |
| | | | | | | | | U5KRS1_BACTU (93.2% identity, 95.57% similarity) |
| | | | | | | | | AGA40054.1 (89.94% identity, 93.52% similarity) |
| | | | | | | | | APG00710 (86.69% identity, 90.7% similarity) |
| | | | | | | | | APG07870 (82.97% identity, 88.14% similarity) |
| | | | | | | | | APG00430 (77.24% identity, 83.52% similarity) |
| | | | | | | | | APG00058 - US_2016_0311864_A1-3 (73.34% |
| | | | | | | | | identity, 80.74% similarity) |
| | | | | | | | | APG00056 - US_2016_0311864_A1-1 (69.12% |
| | | | | | | | | identity, 79.80% similarity) |
| | | | | | | | | APG01387 (66.29% identity, 75.32% similarity) |
| | | | | | | | | APG00687 (57.53% identity, 67.25% similarity) |
| | | | | | | | | APG03519 (55.50% identity, 67.16% similarity) |
| | | | | | | | | Cry32Ab1 (53.97% identity, 65.37% similarity) |
| | | | | | | | | APG05370 (53.33% identity, 64.47% similarity) |
| APG01387 | 13 | 14, 15 | | | Cry32 | 70, 75, 80, 85, 90, 95, | 80, 85, 90, 95, 96, 97, | APG00058 - US_2016_0311864_A1-3 (89.02% |
| | | | | | | 96, 97, 98, 99 | 98, 99 | identity, 90.75% similarity) |
| | | | | | | | | APG07870 (74.81% identity, 81.03% similarity) |
| | | | | | | | | APG00710 (68.39% identity, 77.05% similarity) |
| | | | | | | | | APG00430 (67.97% identity, 77.71% similarity) |
| | | | | | | | | U5KRS1_BACTU (67.82% identity, 76.13% |
| | | | | | | | | similarity) |
| | | | | | | | | US_2011_0203014-23 (67.82% identity, 76.13% |
| | | | | | | | | similarity) |
| | | | | | | | | APG01329 (66.29% identity, 75.32% similarity) |
| | | | | | | | | APG00056 - US_2016_0311864_A1-1 (64.84% |
| | | | | | | | | identity, 75.78% similarity) |
| | | | | | | | | APG00469 (54.20% identity, 65.84% similarity) |
| | | | | | | | | Cry32Da1 (53.60% identity, 65.70% similarity) |
| | | | | | | | | APG05370 (53.31% identity, 63.77% similarity) |
| | | | | | | | | APG03519 (53.17% identity, 65.72% similarity) |
| APG01399 | 16 | 17 | | | Cry | 99 | 100 | WP_017762619.1 (98.64% identity, 99.66% |
| | | | | | | | | similarity) |
| | | | | | | | | US_2013_0227743_A1-206 (55.95% identity, 68.51% |
| | | | | | | | | similarity) |
| | | | | | | | | APG00460 (51.63% identity, 65.36% similarity) |
| | | | | | | | | WP_017762581.1 (34.10% identity, 47.84% |
| | | | | | | | | similarity) |
| | | | | | | | | WP_044306759.1 (33.65% identity, 48.41% |
| | | | | | | | | similarity) |
| APG01459 | 18 | 19 | | | Cry70 | 95, 96, 97, 98, 99 | 97, 98, 99 | APG00728 - US_2016_0304898_A1-219 (98.39% |
| | | | | | | | | identity, 99.13% similarity) |
| | | | | | | | | APG00728.2 - US_2016_0304898_A1-221 (94.80% |
| | | | | | | | | identity, 95.42% similarity) |
| | | | | | | | | APG00025 - US_2016_0304898_A1-41 (94.06% |
| | | | | | | | | identity, 96.78% similarity) |
| | | | | | | | | K0G027_BACTU (93.32% identity, 96.29% |
| | | | | | | | | similarity) |
| | | | | | | | | APG00526 - US_2016_0304898_A1-214 (93.07% |
| | | | | | | | | identity, 95.30% similarity) |
| | | | | | | | | Cry70Ba1 (92.95% identity, 96.04% similarity) |
| | | | | | | | | APG00705 (84.33% identity, 91.06% similarity) |
| | | | | | | | | APG00595 (65.56% identity, 76.84% similarity) |
| APG01474 | 20 | 21 | | | Vip4 | 55, 60, 65, 70, 75, 80, | 70, 75, 80, 85, 90, 95, | US_2013_0227743_A1-130 (53.35% identity, 68.76% |
| | | | | | | 85, 90, 95, 96, 97, 98, | 96, 97, 98, 99 | similarity) |
| | | | | | | 99 | | WP_016123960.1 (53.06% identity, 67.30% |
| | | | | | | | | similarity) |
| | | | | | | | | AGT29561.1 (50.61% identity, 67.37% similarity) |
| | | | | | | | | Vip4Aa1 (49.80% identity, 68.60% similarity) |
| APG01506 | 22 | | | | MTX | 80, 85, 90, 95, 96, 97, | 90, 95, 96, 97, 98, 99 | APG07655 (81.42% identity, 88.18% similarity) |
| | | | | | | 98, 99 | | |
| | | | | | | | | APG03379 (81.21% identity, 87.58% similarity) |
| | | | | | | | | APG00155 - US_2016_0311864_A1-40 (80.74% |
| | | | | | | | | identity, 88.18% similarity) |
| | | | | | | | | APG00201.1 - US_2016_0304898_A1-194 (80.47% |
| | | | | | | | | identity, 86.87% similarity) |
| | | | | | | | | APG08589 (80.41% identity, 90.20% similarity) |
| | | | | | | | | APG08241 (80.07% identity, 88.18% similarity) |
| | | | | | | | | US_2013_0227743_A1-100 (79.73% identity, 88.18% |
| | | | | | | | | similarity) |
| | | | | | | | | J8YPM2_BACCE (79.05% identity, 88.18% |
| | | | | | | | | similarity) |
| | | | | | | | | APG00107 - US_2016_0311864_A1-21 (78.72% |
| | | | | | | | | identity, 88.18% similarity) |
| | | | | | | | | APG00201 - US_2016_0304898_A1-193 (78.62% |
| | | | | | | | | identity, 84.87% similarity) |
| | | | | | | | | APG09682 (77.78% identity, 86.87% similarity) |
| | | | | | | | | APG00847 - US_2016_0304898_A1-223 (77.63% |
| | | | | | | | | identity, 84.54% similarity) |
| APG01517 | 23 | 24 | | | MTX | 40, 45, 50, 55, 60, 65, | 60, 65, 70, 75, 80, 85, | APG03732 (95.22% identity, 97.91% similarity) |
| | | | | | | 70, 75, 80, 85, 90, 95, | 90, 95, 96, 97, 98, 99 | US_2013_0227743_A1-114 (36.09% identity, 55.10% |
| | | | | | | 96, 97, 98, 99 | | similarity) |
| | | | | | | | | US_2013_0227743_A1-112 (34.44% identity, 55.10% |
| | | | | | | | | similarity) |
| | | | | | | | | KOS27986.1 (24.23% identity, 41.78% similarity) |
| | | | | | | | | WP_000052062.1 (23.96% identity, 41.78% |
| | | | | | | | | similarity) |
| APG01522 | 25 | 26 | | | Cry34 | 99 | 99 | WP_069325540.1 (98.29% identity, 98.29% |
| | | | | | | | | similarity) |
| | | | | | | | | APG02291 (90.60% identity, 94.02% similarity) |
| | | | | | | | | WP_046215736.1 (87.18% identity, 92.31% |
| | | | | | | | | similarity) |
| | | | | | | | | WP_052520572.1 (59.83% identity, 76.07% |
| | | | | | | | | similarity) |
| | | | | | | | | Cry34Ab1 (46.03% identity, 57.94% similarity) |
| APG01644 | 27 | 28 | | | Cry | 25, 30, 35, 40, 45, 50, | 40, 45, 50, 55, 60, 65, | APG00110 - US_2016_0177333_A1-60 (86.86% |
| | | | | | | 55, 60, 65, 70, 75, 80, | 70, 75, 80, 85, 90, 95, | identity, 93.02% similarity) |
| | | | | | | 85, 90, 95, 96, 97, 98, | 96, 97, 98, 99 | APG00110.1 - US_2016_0177333_A1-61 (83.26% |
| | | | | | | 99 | | identity, 89.42% similarity) |
| | | | | | | | | APG00110.3 - US_2016_0177333_A1-62 (66.05% |
| | | | | | | | | identity, 69.88% similarity) |
| | | | | | | | | APG00672 (62.61% identity, 74.0% similarity) |
| | | | | | | | | APG00045 - US_2016_0304898_A1-73 (62.56% |
| | | | | | | | | identity, 73.9% similarity) |
| | | | | | | | | APG01742 (61.25% identity, 74.02% similarity) |
| | | | | | | | | Cry70Bb1 (22.81% identity, 37.38% similarity) |
| APG01676 | 29 | 30 | | | MTX | 95, 96, 97, 98, 99 | 97, 98, 99 | AOB42285.1 (93.31% identity, 96.66% similarity) |
| | | | | | | | | APG08411 (86.63% identity, 92.10% similarity) |
| | | | | | | | | APG00989 (86.63% identity, 91.79% similarity) |
| | | | | | | | | APG00309 (82.88% identity, 89.49% similarity) |
| | | | | | | | | C3HSG6_BACTU (70.30% identity, 82.73% |
| | | | | | | | | similarity) |
| | | | | | | | | WP_018673409.1 (67.66% identity, 78.74% |
| | | | | | | | | similarity) |
| | | | | | | | | APG00585 (66.47% identity, 77.25% similarity) |
| | | | | | | | | APG00427 - US_2016_0311864_A1-178 (64.55% |
| | | | | | | | | identity, 76.97% similarity) |
| APG01718 | 31 | 32 | | | Cry | 35, 40, 45, 50, 55, 60, | 55, 60, 65, 70, 75, 80, | WP_057507959.1 (34.97% identity, 51.67% |
| | | | | | | 65, 70, 75, 80, 85, 90, | 85, 90, 95, 96, 97, 98, | similarity) |
| | | | | | | 95, 96, 97, 98, 99 | 99 | WP_042612996.1 (34.36% identity, 47.41% |
| | | | | | | | | similarity) |
| | | | | | | | | WP_042612995.1 (34.02% identity, 52.26% |
| | | | | | | | | similarity) |
| | | | | | | | | Cry1If1 (17.86% identity, 28.05% similarity) |
| APG01742 | 33 | 34 | | | Cry | 90, 95, 96, 97, 98, 99 | 95, 96, 97, 98, 99 | AGA40064.1 (86.50% identity, 91.97% similarity) |
| | | | | | | | | APG00672 (85.22% identity, 91.39% similarity) |
| | | | | | | | | APG00045 - US_2016_0304898_A1-73 (83.67% |
| | | | | | | | | identity, 89.34% similarity) |
| | | | | | | | | US_8318900_B2-69 (78.70% identity, 83.93% |
| | | | | | | | | similarity) |
| | | | | | | | | APG01644 (61.25% identity, 74.02% similarity) |
| | | | | | | | | APG00110 - US_2016_0177333_A1-60 (60.97% |
| | | | | | | | | identity, 72.96% similarity) |
| | | | | | | | | US_8318900_B2-207 (58.00% identity, 63.05% |
| | | | | | | | | similarity) |
| | | | | | | | | Cry70Bb1 (23.80% identity, 40.54% similarity) |
| APG01772 | 35 | | | | Cry | 100 | 100 | WP_017762616.1 (99.64% identity, 99.82% |
| | | | | | | | | similarity) |
| | | | | | | | | WP_048536362.1 (33.86% identity, 47.63% |
| | | | | | | | | similarity) |
| | | | | | | | | APG00603 - US_2016_0311864_A1-198 (32.86% |
| | | | | | | | | identity, 49.65% similarity) |
| | | | | | | | | APG00285.1 - US_2016_0311864_A1-303 (32.51% |
| | | | | | | | | identity, 48.02% similarity) |
| APG01780 | 36 | 37 | | | Cry32 | 75, 80, 85, 90, 95, 96, | 85, 90, 95, 96, 97, 98, | APG07803 (72.78% identity, 80.76% similarity) |
| | | | | | | 97, 98, 99 | 99 | AGP18022.1 (71.22% identity, 82.31% similarity) |
| | | | | | | | | APG00007 - US_2016_0304898_A1-11 (70.83% |
| | | | | | | | | identity, 82.23% similarity) |
| | | | | | | | | APG00188 - US_2016_0311864_A1-57 (69.15% |
| | | | | | | | | identity, 78.92% similarity) |
| | | | | | | | | APG06253 (69.06% identity, 78.99% similarity) |
| | | | | | | | | APG01915 (64.66% identity, 75.27% similarity) |
| | | | | | | | | US_2013_0227743_A1-48 (44.55% identity, 56.40% |
| | | | | | | | | similarity) |
| | | | | | | | | AEH76820.1 (44.47% identity, 58.41% similarity) |
| | | | | | | | | Cry32Ca1 (43.34% identity, 57.60% similarity) |
| APG01790 | 38 | 39 | | | Bin | 95, 96, 97, 98, 99 | 95, 96, 97, 98, 99 | APG00118 - US_2016_0311864_A1-28 (91.01% |
| | | | | | | | | identity, 94.01% similarity) |
| | | | | | | | | J8MIQ2_BACCE (90.16% identity, 91.10% |
| | | | | | | | | similarity) |
| | | | | | | | | APG00454 - US_2016_0311864_A1-179 (90.09% |
| | | | | | | | | identity, 94.70% similarity) |
| | | | | | | | | APG00335 (89.17% identity, 94.47% similarity) |
| | | | | | | | | APG00242 - US_2016_0311864_A1-93 (88.94% |
| | | | | | | | | identity, 94.24% similarity) |
| | | | | | | | | APG00913 - US_2016_0311864_A1-226 (84.48% |
| | | | | | | | | identity, 88.91% similarity) |
| | | | | | | | | APG04176 (51.47% identity, 66.44% similarity) |
| | | | | | | | | APG05715 (51.47% identity, 65.76% similarity) |
| | | | | | | | | APG02445 (51.25% identity, 65.83% similarity) |
| | | | | | | | | Cry35Ab4 (19.38% identity, 36.56% similarity) |
| APG01849 | 40 | 41, 42 | | | MTX | 85, 90, 95, 96, 97, 98, | 90, 95, 96, 97, 98, 99 | WP_051965558.1 (83.82% identity, 88.89% |
| | | | | | | 99 | | similarity) |
| | | | | | | | | WP_051742725.1 (32.75% identity, 45.49% |
| | | | | | | | | similarity) |
| | | | | | | | | SDS90165.1 (32.31% identity, 43.96% similarity) |
| | | | | | | | | WP_067035588.1 (26.22% identity, 40.59% |
| | | | | | | | | similarity) |
| APG01915 | 43 | 44 | | | Cry32 | 70, 75, 80, 85, 90, 95, | 85, 90, 95, 96, 97, 98, | APG06253 (74.69% identity, 83.54% similarity) |
| | | | | | | 96, 97, 98, 99 | 99 | APG00188 - US_2016_0311864_A1-57 (73.85% |
| | | | | | | | | identity, 82.77% similarity) |
| | | | | | | | | APG07803 (70.57% identity, 80.58% similarity) |
| | | | | | | | | AGP18022.1 (69.43% identity, 80.31% similarity) |
| | | | | | | | | APG00007 - US_2016_0304898_A1-11 (68.97% |
| | | | | | | | | identity, 79.23% similarity) |
| | | | | | | | | APG01780 (64.66% identity, 75.27% similarity) |
| | | | | | | | | US_2013_0227743_A1-48 (45.77% identity, 58.76% |
| | | | | | | | | similarity) |
| | | | | | | | | Cry32Ca1 (44.61% identity, 58.26% similarity) |
| APG01937 | 45 | | | | Bin | 30, 35, 40, 45, 50, 55, | 40, 45, 50, 55, 60, 65, | WP_063780311.1 (27.05% identity, 37.68% |
| | | | | | | 60, 65, 70, 75, 80, 85, | 70, 75, 80, 85, 90, 95, | similarity) |
| | | | | | | 90, 95, 96, 97, 98, 99 | 96, 97, 98, 99 | SDT78826.1 (22.01% identity, 26.18% similarity) |
| | | | | | | | | KOU65337.1 (21.79% identity, 27.93% similarity) |
| | | | | | | | | Cry34Ac2 (21.10% identity, 27.98% similarity) |
| APG01996 | 46 | | | | MTX | 25, 30, 35, 40, 45, 50, | 45, 50, 55, 60, 65, 70, | APG02633 (33.80% identity, 52.61% similarity) |
| | | | | | | 55, 60, 65, 70, 75, 80, | 75, 80, 85, 90, 95, 96, | APG06768 (29.18% identity, 44.59% similarity) |
| | | | | | | 85, 90, 95, 96, 97, 98, | 97, 98, 99 | APG00236 (28.57% identity, 50.32% similarity) |
| | | | | | | 99 | | APG06880 (28.26% identity, 44.72% similarity) |
| | | | | | | | | APG00598 (27.48% identity, 44.09% similarity) |
| | | | | | | | | APG07983 (26.40% identity, 41.25% similarity) |
| | | | | | | | | APG09455 (26.07% identity, 42.94% similarity) |
| | | | | | | | | US_2015_0047076_A1-11 (24.28% identity, 42.49% |
| | | | | | | | | similarity) |
| APG02168 | 47 | | | | MTX | 35, 40, 45, 50, 55, 60, | 50, 55, 60, 65, 70, 75, | APG09232 (76.88% identity, 85.84% similarity) |
| | | | | | | 65, 70, 75, 80, 85, 90, | 80, 85, 90, 95, 96, 97, | WP_065845806.1 (33.9% identity, 49.15% similarity) |
| | | | | | | 95, 96, 97, 98, 99 | 98, 99 | SDW46809.1 (29.27% identity, 48.51% similarity) |
| | | | | | | | | SDX17518.1 (27.81% identity, 44.65% similarity) |
| | | | | | | | | WP_006918908.1 (22.44% identity, 41.0% similarity) |
| APG02215 | 48 | 49 | | | Bin | 50, 55, 60, 65, 70, 75, | 65, 70, 75, 80, 85, 90, | WP_010169077.1 (49.89% identity, 62.58% |
| | | | | | | 80, 85, 90, 95, 96, 97, | 95, 96, 97, 98, 99 | similarity) |
| | | | | | | 98, 99 | | SFP27084.1 (47.76% identity, 61.41% similarity) |
| | | | | | | | | SET43751.1 (47.55% identity, 61.41% similarity) |
| | | | | | | | | SFB00510.1 (47.55% identity, 61.41% similarity) |
| APG02262 | 50 | | | | Cry | 20, 25, 30, 35, 40, 45, | 20, 25, 30, 35, 40, 45, | WP_025143599.1 (16.96% identity, 17.62% |
| | | | | | | 50, 55, 60, 65, 70, 75, | 50, 55, 60, 65, 70, 75, | similarity) |
| | | | | | | 80, 85, 90, 95, 96, 97, | 80, 85, 90, 95, 96, 97, | |
| | | | | | | 98, 99 | 98, 99 | |
| APG02291 | 51 | | | | Cry34 | 95, 96, 97, 98, 99 | 96, 97, 98, 99 | WP_069325540.1 (92.17% identity, 95.65% |
| | | | | | | | | similarity) |
| | | | | | | | | APG01522 (90.6% identity, 94.02% similarity) |
| | | | | | | | | WP_046215736.1 (89.57% identity, 93.04% |
| | | | | | | | | similarity) |
| | | | | | | | | WP_052520572.1 (62.61% identity, 77.39% |
| | | | | | | | | similarity) |
| | | | | | | | | Cry34Ac3 (47.58% identity, 57.26% similarity) |
| APG02293 | 52 | 53 | | | MTX | 98, 99 | 100 | WP_050845726.1 (97.85% identity, 99.69% |
| | | | | | | | | similarity) |
| | | | | | | | | WP_000823322.1 (96.93% identity, 98.77% |
| | | | | | | | | similarity) |
| | | | | | | | | WP_016084062.1 (96.63% identity, 98.47% |
| | | | | | | | | similarity) |
| | | | | | | | | WP_016085044.1 (96.32% identity, 98.16% |
| | | | | | | | | similarity) |
| | | | | | | | | APG07036 (94.17% identity, 94.79% similarity) |
| | | | | | | | | APG04804 (69.02% identity, 80.98% similarity) |
| | | | | | | | | APG04640 (68.4% identity, 81.29% similarity) |
| | | | | | | | | APG06161 (68.1% identity, 81.6% similarity) |
| APG02408 | 54 | 55, 56 | | | MTX | 95, 96, 97, 98, 99 | 95, 96, 97, 98, 99 | WP_040729904.1 (90.65% identity, 94.39% |
| | | | | | | | | similarity) |
| | | | | | | | | EHQ63877.1 (85.98% identity, 89.1% similarity) |
| | | | | | | | | WP_019421057.1 (77.47% identity, 86.73% |
| | | | | | | | | similarity) |
| | | | | | | | | WP_006285537.1 (73.72% identity, 83.38% |
| | | | | | | | | similarity) |
| APG02445 | 57 | 58 | | | Bin | 90, 95, 96, 97, 98, 99 | 95, 96, 97, 98, 99 | APG05715 (96.73% identity, 98.99% similarity) |
| | | | | | | | | APG04176 (94.47% identity, 96.98% similarity) |
| | | | | | | | | WP_070144216.1 (88.94% identity, 93.72% |
| | | | | | | | | similarity) |
| | | | | | | | | APG00806 (88.44% identity, 94.47% similarity) |
| | | | | | | | | SDE18889.1 (86.25% identity, 93.25% similarity) |
| | | | | | | | | APG00212.1 - US_2016_0311864_A1-259 (86.00% |
| | | | | | | | | identity, 91.15% similarity) |
| | | | | | | | | APG00212 - US_2016_0311864_A1-75 (84.13% |
| | | | | | | | | identity, 89.18% similarity) |
| | | | | | | | | APG07818 (81.33% identity, 88.21% similarity) |
| | | | | | | | | APG00592 - US_2016_0311864_A1-195 (80.54% |
| | | | | | | | | identity, 87.35% similarity) |
| | | | | | | | | APG00619 - US_2016_0311864_A1-199 (80.15% |
| | | | | | | | | identity, 88.34% similarity) |
| | | | | | | | | APG00798 - US_2016_0311864_A1-219 (78.90% |
| | | | | | | | | identity, 86.09% similarity) |
| | | | | | | | | APG01790 (51.25% identity, 65.83% similarity) |
| | | | | | | | | Cry35Ba1 (23.48% identity, 38.04% similarity) |
| APG02477 | 59 | 60 | | | MTX | 20, 25, 30, 35, 40, 45, | 30, 35, 40, 45, 50, 55, | APG07002 (50.49% identity, 51.14% similarity) |
| | | | | | | 50, 55, 60, 65, 70, 75, | 60, 65, 70, 75, 80, 85, | WP_025150761.1 (18.10% identity, 26.69% |
| | | | | | | 80, 85, 90, 95, 96, 97, | 90, 95, 96, 97, 98, 99 | similarity) |
| | | | | | | 98, 99 | | WP_016131662.1 (17.48% identity, 27.91% |
| | | | | | | | | similarity) |
| | | | | | | | | WP_016113347.1 (16.98% identity, 27.47% |
| | | | | | | | | similarity) |
| | | | | | | | | WP_002193657.1 (15.32% identity, 26.13% |
| | | | | | | | | similarity) |
| APG02638 | 61 | | | | MTX | 80, 85, 90, 95, 96, 97, | 90, 95, 96, 97, 98, 99 | APG00749 (89.70% identity, 95.02% similarity) |
| | | | | | | 98, 99 | | APG03379 (87.63% identity, 93.98% similarity) |
| | | | | | | | | US_2013_0227743_A1-100 (79.00% identity, 86.00% |
| | | | | | | | | similarity) |
| | | | | | | | | APG00006.2 - US_2016_0304898_A1-228 (78.93% |
| | | | | | | | | identity, 89.97% similarity) |
| | | | | | | | | APG07655 (78.93% identity, 87.96% similarity) |
| | | | | | | | | J8YPM2_BACCE (78.33% identity, 85.67% |
| | | | | | | | | similarity) |
| | | | | | | | | APG00201.1 - US_2016_0304898_A1-194 (78.26% |
| | | | | | | | | identity, 88.63% similarity) |
| | | | | | | | | APG02279 (78.10% identity, 85.95% similarity) |
| | | | | | | | | APG08088 (77.81% identity, 87.42% similarity) |
| | | | | | | | | APG09682 (77.15% identity, 86.42% similarity) |
| | | | | | | | | APG00006 - US_2016_0304898_A1-9 (77.12% |
| | | | | | | | | identity, 87.91% similarity) |
| | | | | | | | | APG00566 (76.47% identity, 89.22% similarity) |
| | | | | | | | | APG01086 (75.49% identity, 88.24% similarity) |
| APG02782 | 62 | 63, 64 | | | MTX | 80, 85, 90, 95, 96, 97, | 90, 95, 96, 97, 98, 99 | APG02960 (84.97% identity, 93.56% similarity) |
| | | | | | | 98, 99 | | APG04643 (84.05% identity, 93.56% similarity) |
| | | | | | | | | APG08085 (82.82% identity, 88.96% similarity) |
| | | | | | | | | APG02555 (80.98% identity, 88.04% similarity) |
| | | | | | | | | APG00743 (79.75% identity, 87.73% similarity) |
| | | | | | | | | WP_044444098.1 (79.75% identity, 87.73% |
| | | | | | | | | similarity) |
| | | | | | | | | WP_060749709.1 (77.06% identity, 85.93% |
| | | | | | | | | similarity) |
| | | | | | | | | SFC26517.1 (75.54% identity, 83.49% similarity) |
| | | | | | | | | WP_016132978.1 (51.78% identity, 65.68% |
| | | | | | | | | similarity) |
| | | | | | | | | APG05651 (51.49% identity, 66.07% similarity) |
| | | | | | | | | APG05084 (50.59% identity, 64.20% similarity) |
| APG02798 | 65 | 66 | | | MTX | 55, 60, 65, 70, 75, 80, | 80, 85, 90, 95, 96, 97, | W0LFY6_SERFO (53.52% identity, 75.00% |
| | | | | | | 85, 90, 95, 96, 97, 98, | 98, 99 | similarity) |
| | | | | | | 99 | | CA_2753918-21 (30.53% identity, 47.04% similarity) |
| | | | | | | | | R8CLR6_BACCE (30.22% identity, 47.35% |
| | | | | | | | | similarity) |
| | | | | | | | | S2KUF5_BACCE (30.22% identity, 47.35% |
| | | | | | | | | similarity) |
| APG02809 | 67 | | | | MTX | 75, 80, 85, 90, 95, 96, | 85, 90, 95, 96, 97, 98, | WP_000982046.1 (71.48% identity, 81.75% |
| | | | | | | 97, 98, 99 | 99 | similarity) |
| | | | | | | | | ADY24997.2 (70.15% identity, 80.22% similarity) |
| | | | | | | | | AAA22332.1 (25.08% identity, 44.05% similarity) |
| | | | | | | | | WP_033694890.1 (20.00% identity, 35.07% |
| | | | | | | | | similarity) |
| APG02912 | 68 | 69 | | | MACPF | 45, 50, 55, 60, 65, 70, | 65, 70, 75, 80, 85, 90, | APG03726 (72.73% identity, 83.00% similarity) |
| | | | | | | 75, 80, 85, 90, 95, 96, | 95, 96, 97, 98, 99 | APG04597 (54.65% identity, 62.48% similarity) |
| | | | | | | 97, 98, 99 | | WP_019961352.1 (44.84% identity, 60.52% |
| | | | | | | | | similarity) |
| | | | | | | | | WP_046018755.1 (34.98% identity, 51.14% |
| | | | | | | | | similarity) |
| | | | | | | | | WP_012039071.1 (34.74% identity, 52.40% |
| | | | | | | | | similarity) |
| | | | | | | | | WP_012145116.1 (34.45% identity, 56.30% |
| | | | | | | | | similarity) |
| APG03015 | 70 | 71 | | | MTX | 75, 80, 85, 90, 95, 96, | 85, 90, 95, 96, 97, 98, | APG00344 (88.22% identity, 93.39% similarity) |
| | | | | | | 97, 98, 99 | 99 | APG00477 (71.26% identity, 83.05% similarity) |
| | | | | | | | | R8S542_BACCE (70.98% identity, 82.76% similarity) |
| | | | | | | | | APG00384 (57.26% identity, 72.08% similarity) |
| | | | | | | | | R8S773_BACCE (45.94% identity, 64.15% similarity) |
| | | | | | | | | APG00982 - US_2016_0304898_A1-226 (45.61% |
| | | | | | | | | identity, 63.17% similarity) |
| | | | | | | | | APG00092 - US_2016_0304898_A1-122 (45.53% |
| | | | | | | | | identity, 60.89% similarity) |
| APG03053 | 72 | 73 | | | MTX | 85, 90, 95, 96, 97, 98, | 95, 96, 97, 98, 99 | APG00098.1 - US_2016_0304898_A1-129 (84.92% |
| | | | | | | 99 | | identity, 91.38% similarity) |
| | | | | | | | | AGA40063.1 (84.62% identity, 90.15% similarity) |
| | | | | | | | | APG00098 - US_2016_0304898_A1-128 (83.29% |
| | | | | | | | | identity, 89.63% similarity) |
| | | | | | | | | APG00899 (83.00% identity, 89.05% similarity) |
| | | | | | | | | Cry60Ba2 (32.07% identity, 46.65% similarity) |
| APG03072 | 74 | 75 | | | MTX | 100 | 100 | WP_047426867.1 (99.70% identity, 99.70% |
| | | | | | | | | similarity) |
| | | | | | | | | WP_062673074.1 (92.12% identity, 96.36% |
| | | | | | | | | similarity) |
| | | | | | | | | APG02518 (88.18% identity, 93.33% similarity) |
| | | | | | | | | APG07574 (87.88% identity, 93.33% similarity) |
| | | | | | | | | APG03185 (87.27% identity, 92.73% similarity) |
| | | | | | | | | APG03114 (78.98% identity, 90.69% similarity) |
| | | | | | | | | WP_034734550.1 (78.55% identity, 91.54% |
| | | | | | | | | similarity) |
| | | | | | | | | WP_027372020.1 (77.95% identity, 90.94% |
| | | | | | | | | similarity) |
| APG03080 | 76 | | | | Cyt | 97, 98, 99 | 99 | APG00388 - US_2016_0311864_A1-159 (99.58% |
| | | | | | | | | identity, 100.0% similarity) |
| | | | | | | | | SAY46370.1 (96.25% identity, 98.75% similarity) |
| | | | | | | | | WP_058393986.1 (43.97% identity, 59.92% |
| | | | | | | | | similarity) |
| | | | | | | | | Cyt1Aa6 (30.47% identity, 51.56% similarity) |
| APG03227 | 77 | 78 | | | MTX | 60, 65, 70, 75, 80, 85, | 75, 80, 85, 90, 95, 96, | APG03867 (82.45% identity, 89.97% similarity) |
| | | | | | | 90, 95, 96, 97, 98, 99 | 97, 98, 99 | APG00143 (66.36% identity, 78.40% similarity) |
| | | | | | | | | APG00444 (64.69% identity, 78.13% similarity) |
| | | | | | | | | APG00441 (64.69% identity, 77.50% similarity) |
| | | | | | | | | APG00833 (62.31% identity, 77.88% similarity) |
| | | | | | | | | WP_065845806.1 (58.51% identity, 71.52% |
| | | | | | | | | similarity) |
| | | | | | | | | SDX17518.1 (48.53% identity, 64.41% similarity) |
| | | | | | | | | SDW46809.1 (46.08% identity, 63.25% similarity) |
| | | | | | | | | WP_006918908.1 (31.71% identity, 50.00% |
| | | | | | | | | similarity) |
| APG03249 | 79 | 80 | | | MTX | 35, 40, 45, 50, 55, 60, | 50, 55, 60, 65, 70, 75, | APG00601 (97.86% identity, 97.86% similarity) |
| | | | | | | 65, 70, 75, 80, 85, 90, | 80, 85, 90, 95, 96, 97, | APG00091 - US_2016_0304898_A1-120 (96.07% |
| | | | | | | 95, 96, 97, 98, 99 | 98, 99 | identity, 97.50% similarity) |
| | | | | | | | | APG00021 - US_2016_0304898_A1-35 (95.36% |
| | | | | | | | | identity, 97.86% similarity) |
| | | | | | | | | APG00091.1 - US_2016_0304898_A1-121 (94.29% |
| | | | | | | | | identity, 95.71% similarity) |
| | | | | | | | | APG00850 (75.36% identity, 87.5% similarity) |
| | | | | | | | | Cry45Aa (31.16% identity, 46.58% similarity) |
| APG03299 | 81 | | | | MTX | 75, 80, 85, 90, 95, 96, | 75, 80, 85, 90, 95, 96, | APG09256 (73.64% identity, 75.19% similarity) |
| | | | | | | 97, 98, 99 | 97, 98, 99 | WP_000586614.1 (72.20% identity, 73.75% |
| | | | | | | | | similarity) |
| | | | | | | | | WP_000586616.1 (72.20% identity, 73.75% |
| | | | | | | | | similarity) |
| | | | | | | | | WP_063549995.1 (71.81% identity, 73.36% |
| | | | | | | | | similarity) |
| | | | | | | | | APG09842 (70.27% identity, 73.36% similarity) |
| | | | | | | | | APG02768 (69.11% identity, 72.97% similarity) |
| | | | | | | | | APG02429 (69.11% identity, 72.59% similarity) |
| | | | | | | | | APG01103 (68.73% identity, 72.97% similarity) |
| | | | | | | | | Cry46Ab (22.73% identity, 33.77% similarity) |
| APG03309 | 82 | 83 | | | Cyt | 80, 85, 90, 95, 96, 97, | 90, 95, 96, 97, 98, 99 | APG08780 (88.66% identity, 93.30% similarity) |
| | | | | | | 98, 99 | | WP_030313032.1 (78.87% identity, 88.66% |
| | | | | | | | | similarity) |
| | | | | | | | | APG00945 (78.57% identity, 85.20% similarity) |
| | | | | | | | | APG00134 - US_2016_0311864_A1-32 (78.35% |
| | | | | | | | | identity, 88.14% similarity) |
| | | | | | | | | WP_055599179.1 (78.35% identity, 88.14% |
| | | | | | | | | similarity) |
| | | | | | | | | APG00327 (72.48% identity, 74.03% similarity) |
| | | | | | | | | APG00108 - US_2016_0311864_A1-22 (57.46% |
| | | | | | | | | identity, 64.18% similarity) |
| | | | | | | | | Cyt2Ca1 (25.11% identity, 43.72% similarity) |
| APG03379 | 84 | | | | MTX | 80, 85, 90, 95, 96, 97, | 90, 95, 96, 97, 98, 99 | APG00749 (88.33% identity, 95.00% similarity) |
| | | | | | | 98, 99 | | APG02638 (87.63% identity, 93.98% similarity) |
| | | | | | | | | APG07655 (81.88% identity, 88.93% similarity) |
| | | | | | | | | APG09682 (81.54% identity, 88.26% similarity) |
| | | | | | | | | APG00006.2 - US_2016_0304898_A1-228 (80.87% |
| | | | | | | | | identity, 91.28% similarity) |
| | | | | | | | | APG00201.1 - US_2016_0304898_A1-194 (80.87% |
| | | | | | | | | identity, 89.60% similarity) |
| | | | | | | | | APG08088 (79.4% identity, 88.70% similarity) |
| | | | | | | | | APG00006 - US_2016_0304898_A1-9 (79.02% |
| | | | | | | | | identity, 89.18% similarity) |
| | | | | | | | | APG00201 - US_2016_0304898_A1-193 (79.02% |
| | | | | | | | | identity, 87.54% similarity) |
| | | | | | | | | APG00847 - US_2016_0304898_A1-223 (78.36% |
| | | | | | | | | identity, 87.21% similarity) |
| | | | | | | | | APG00566 (78.10% identity, 87.91% similarity) |
| | | | | | | | | J8YPM2_BACCE (77.59% identity, 85.62% |
| | | | | | | | | similarity) |
| APG03519 | 85 | 86, 87 | | | Cry32 | 85, 90, 95, 96, 97, 98, | 90, 95, 96, 97, 98, 99 | Cry32Da1 (81.69% identity, 87.31% similarity) |
| | | | | | | 99 | | APG00710 (57.21% identity, 68.35% similarity) |
| | | | | | | | | APG00056 - US_2016_0311864_A1-1 (56.79% |
| | | | | | | | | identity, 67.22% similarity) |
| | | | | | | | | APG01329 (55.50% identity, 67.16% similarity) |
| | | | | | | | | APG00430 (55.30% identity, 66.64% similarity) |
| | | | | | | | | APG00504 (54.68% identity, 64.86% similarity) |
| | | | | | | | | APG00068 - US_2016_0177333_A1-35 (53.91% |
| | | | | | | | | identity, 65.14% similarity) |
| | | | | | | | | APG06739 (53.25% identity, 64.35% similarity) |
| | | | | | | | | APG01387 (53.17% identity, 65.72% similarity) |
| | | | | | | | | APG06650 (52.74% identity, 65.03% similarity) |
| APG03569 | 88 | | | | Cry | 30, 35, 40, 45, 50, 55, | 50, 55, 60, 65, 70, 75, | US_2013_0227743_A1-184 (28.75% identity, 45.80% |
| | | | | | | 60, 65, 70, 75, 80, 85, | 80, 85, 90, 95, 96, 97, | similarity) |
| | | | | | | 90, 95, 96, 97, 98, 99 | 98, 99 | APG00267.2 - US_2016_0311864_A1-294 (24.90% |
| | | | | | | | | identity, 37.07% similarity) |
| | | | | | | | | WP_048536362.1 (24.07% identity, 35.42% |
| | | | | | | | | similarity) |
| | | | | | | | | WP_048536363.1 (23.32% identity, 34.28% |
| | | | | | | | | similarity) |
| APG03604 | 89 | | | | MTX | 96, 97, 98, 99 | 100 | SDI38744.1 (95.70% identity, 99.28% similarity) |
| | | | | | | | | WP_065397681.1 (88.89% identity, 94.62% |
| | | | | | | | | similarity) |
| | | | | | | | | I0KFP2_9BACT (39.73% identity, 57.91% similarity) |
| | | | | | | | | WP_053730552.1 (38.69% identity, 55.65% |
| | | | | | | | | similarity) |
| APG03699 | 90 | 91 | | | Cry | 35, 40, 45, 50, 55, 60, | 45, 50, 55, 60, 65, 70, | US_2013_0227743_A1-152 (30.76% identity, 43.53% |
| | | | | | | 65, 70, 75, 80, 85, 90, | 75, 80, 85, 90, 95, 96, | similarity) |
| | | | | | | 95, 96, 97, 98, 99 | 97, 98, 99 | WP_048536362.1 (27.72% identity, 42.83% |
| | | | | | | | | similarity) |
| | | | | | | | | US_2013_0227743_A1-202 (27.22% identity, 40.90% |
| | | | | | | | | similarity) |
| | | | | | | | | Cry1Id1 (13.45% identity, 24.97% similarity) |
| APG03722 | 92 | 93, 94 | | | Cry32 | 80, 85, 90, 95, 96, 97, | 85, 90, 95, 96, 97, 98, | AGA40028.1 (75.75% identity, 81.78% similarity) |
| | | | | | | 98, 99 | 99 | AGP18036.1 (59.38% identity, 71.31% similarity) |
| | | | | | | | | AGP18046.1 (53.44% identity, 66.39% similarity) |
| | | | | | | | | Cry4Ba1 (28.29% identity, 41.69% similarity) |
| APG03726 | 95 | 96 | | | MACPF | 50, 55, 60, 65, 70, 75, | 65, 70, 75, 80, 85, 90, | APG04597 (73.33% identity, 73.63% similarity) |
| | | | | | | 80, 85, 90, 95, 96, 97, | 95, 96, 97, 98, 99 | APG02912 (72.73% identity, 83.00% similarity) |
| | | | | | | 98, 99 | | WP_019961352.1 (48.54% identity, 63.35% |
| | | | | | | | | similarity) |
| | | | | | | | | WP_012039071.1 (37.38% identity, 53.95% |
| | | | | | | | | similarity) |
| | | | | | | | | WP_046018755.1 (36.94% identity, 53.58% |
| | | | | | | | | similarity) |
| | | | | | | | | WP_012145116.1 (33.72% identity, 55.56% |
| | | | | | | | | similarity) |
| APG03732 | 97 | 98 | | | MTX | 40, 45, 50, 55, 60, 65, | 55, 60, 65, 70, 75, 80, | APG01517 (95.22% identity, 97.91% similarity) |
| | | | | | | 70, 75, 80, 85, 90, 95, | 85, 90, 95, 96, 97, 98, | US_2013_0227743_A1-114 (35.81% identity, 53.99% |
| | | | | | | 96, 97, 98, 99 | 99 | similarity) |
| | | | | | | | | US_2013_0227743_A1-112 (34.44% identity, 54.27% |
| | | | | | | | | similarity) |
| | | | | | | | | ADK08315.1 (25.70% identity, 44.69% similarity) |
| | | | | | | | | AIK29697.1 (23.83% identity, 41.45% similarity) |
| APG03746 | 99 | 100, 101 | | | MTX | 95, 96, 97, 98, 99 | 98, 99 | APG00049 - US_2016_0304898_A1-78 (96.27% |
| | | | | | | | | identity, 98.31% similarity) |
| | | | | | | | | WP_000730625.1 (94.92% identity, 97.29% |
| | | | | | | | | similarity) |
| | | | | | | | | WP_003290257.1 (91.86% identity, 94.14% |
| | | | | | | | | similarity) |
| | | | | | | | | APG00049.1 - US_2016_0304898_A1-79 (86.44% |
| | | | | | | | | identity, 88.47% similarity) |
| | | | | | | | | APG00013 - US_2016_0304898_A1-22 (50.16% |
| | | | | | | | | identity, 67.19% similarity) |
| APG03786 | 102 | 103 | | | Cry59 | 70, 75, 80, 85, 90, 95, | 80, 85, 90, 95, 96, 97, | AEX56526.1 (67.74% identity, 78.54% similarity) |
| | | | | | | 96, 97, 98, 99 | 98, 99 | Cry59Aa1 (61.23% identity, 70.96% similarity) |
| APG03848 | 104 | 105 | | | MTX | 35, 40, 45, 50, 55, 60, | 50, 55, 60, 65, 70, 75, | WP_065486138.1 (33.24% identity, 49.47% |
| | | | | | | 65, 70, 75, 80, 85, 90, | 80, 85, 90, 95, 96, 97, | similarity) |
| | | | | | | 95, 96, 97, 98, 99 | 98, 99 | WP_065487080.1 (33.24% identity, 49.47% |
| | | | | | | | | similarity) |
| | | | | | | | | J8Y0J8_BACCE (32.17% identity, 48.53% similarity) |
| | | | | | | | | US_2008_0070829_A1-11 (31.77% identity, 47.40% |
| | | | | | | | | similarity) |
| APG03901 | 106 | 107, 108 | | | Cry | 30, 35, 40, 45, 50, 55, | 50, 55, 60, 65, 70, 75, | US_2013_0227743_A1-198 (27.16% identity, 45.00% |
| | | | | | | 60, 65, 70, 75, 80, 85, | 80, 85, 90, 95, 96, 97, | similarity) |
| | | | | | | 90, 95, 96, 97, 98, 99 | 98, 99 | WP_048536348.1 (24.07% identity, 39.24% |
| | | | | | | | | similarity) |
| | | | | | | | | APG00061 - US_2016_0304898_A1-92 (23.88% |
| | | | | | | | | identity, 41.32% similarity) |
| | | | | | | | | Cry70Bb1 (20.6% identity, 35.9% similarity) |
| APG03947 | 109 | 110, 111 | | | MTX | 100 | 100 | B1HN08_LYSSC (99.72% identity, 100.00% |
| | | | | | | | | similarity) |
| | | | | | | | | WP_051563179.1 (96.62% identity, 96.62% |
| | | | | | | | | similarity) |
| | | | | | | | | WP_051800214.1 (96.34% identity, 96.62% |
| | | | | | | | | similarity) |
| | | | | | | | | WP_051891081.1 (96.34% identity, 96.62% |
| | | | | | | | | similarity) |
| APG04013 | 112 | 113 | | | MTX | 35, 40, 45, 50, 55, 60, | 45, 50, 55, 60, 65, 70, | APG00014 - US_2016_0304898_A1-24 (84.62% |
| | | | | | | 65, 70, 75, 80, 85, 90, | 75, 80, 85, 90, 95, 96, | identity, 87.76% similarity) |
| | | | | | | 95, 96, 97, 98, 99 | 97, 98, 99 | WP_033694890.1 (31.65% identity, 42.55% |
| | | | | | | | | similarity) |
| | | | | | | | | AF316145_1 (29.9% identity, 47.84% similarity) |
| | | | | | | | | AAA22332.1 (28.06% identity, 41.79% similarity) |
| APG04076 | 114 | 115 | | | MTX | 75, 80, 85, 90, 95, 96, | 85, 90, 95, 96, 97, 98, | APG00201 - US_2016_0304898_A1-193 (76.07% |
| | | | | | | 97, 98, 99 | 99 | identity, 86.56% similarity) |
| | | | | | | | | APG00847 - US_2016_0304898_A1-223 (75.74% |
| | | | | | | | | identity, 86.56% similarity) |
| | | | | | | | | APG00036 - US_2016_0304898_A1-60 (74.92% |
| | | | | | | | | identity, 85.15% similarity) |
| | | | | | | | | APG00201.1 - US_2016_0304898_A1-194 (74.75% |
| | | | | | | | | identity, 84.92% similarity) |
| | | | | | | | | APG09682 (74.43% identity, 84.92% similarity) |
| | | | | | | | | APG00260 (74.10% identity, 85.57% similarity) |
| | | | | | | | | APG04720 (72.94% identity, 83.83% similarity) |
| | | | | | | | | APG00006 - US_2016_0304898_A1-9 (72.55% |
| | | | | | | | | identity, 84.97% similarity) |
| | | | | | | | | APG06690 (72.37% identity, 84.21% similarity) |
| | | | | | | | | APG08088 (71.95% identity, 84.82% similarity) |
| | | | | | | | | US_2013_0227743_A1-100 (70.59% identity, 82.03% |
| | | | | | | | | similarity) |
| APG04176 | 116 | 117 | | | Bin | 90, 95, 96, 97, 98, 99 | 95, 96, 97, 98, 99 | APG02445 (94.47% identity, 96.98% similarity) |
| | | | | | | | | APG05715 (93.72% identity, 96.98% similarity) |
| | | | | | | | | WP_070144216.1 (89.45% identity, 94.47% |
| | | | | | | | | similarity) |
| | | | | | | | | APG00806 (88.44% identity, 94.47% similarity) |
| | | | | | | | | APG00212.1 - US_2016_0311864_A1-259 (87.84% |
| | | | | | | | | identity, 92.56% similarity) |
| | | | | | | | | SDE18889.1 (86.75% identity, 93.25% similarity) |
| | | | | | | | | APG00212 - US_2016_0311864_A1-75 (85.92% |
| | | | | | | | | identity, 90.53% similarity) |
| | | | | | | | | APG07818 (82.38% identity, 89.33% similarity) |
| | | | | | | | | APG00619 - US_2016_0311864_A1-199 (80.69% |
| | | | | | | | | identity, 89.11% similarity) |
| | | | | | | | | APG00592 - US_2016_0311864_A1-195 (80.58% |
| | | | | | | | | identity, 87.62% similarity) |
| | | | | | | | | APG00798 - US_2016_0311864_A1-219 (80.15% |
| | | | | | | | | identity, 87.41% similarity) |
| | | | | | | | | APG01790 (51.47% identity, 66.44% similarity) |
| | | | | | | | | Cry35Ad1 (20.09% identity, 36.30% similarity) |
| APG04332 | 118 | 119 | | | Cry8 | 45, 50, 55, 60, 65, 70, | 60, 65, 70, 75, 80, 85, | WP_061885066.1 (44.33% identity, 57.76% |
| | | | | | | 75, 80, 85, 90, 95, 96, | 90, 95, 96, 97, 98, 99 | similarity) |
| | | | | | | 97, 98, 99 | | US_2013_0227743_A1-70 (35.29% identity, 45.42% |
| | | | | | | | | similarity) |
| | | | | | | | | AGP18068.1 (31.99% identity, 41.35% similarity) |
| | | | | | | | | Cry8Aa1 (30.55% identity, 39.39% similarity) |
| APG04350 | 120 | 121 | | | Cry32 | 60, 65, 70, 75, 80, 85, | 70, 75, 80, 85, 90, 95, | AGP18058.1 (57.10% identity, 68.41% similarity) |
| | | | | | | 90, 95, 96, 97, 98, 99 | 96, 97, 98, 99 | AGP18029.1 (54.09% identity, 66.03% similarity) |
| | | | | | | | | AGP18037.1 (53.98% identity, 67.38% similarity) |
| | | | | | | | | Cry32Ea1 (43.50% identity, 56.78% similarity) |
| APG04365 | 122 | 123 | | | Vip4 | 45, 50, 55, 60, 65, 70, | 60, 65, 70, 75, 80, 85, | WP_000769710.1 (43.36% identity, 59.54% |
| | | | | | | 75, 80, 85, 90, 95, 96, | 90, 95, 96, 97, 98, 99 | similarity) |
| | | | | | | 97, 98, 99 | | SCC34829.1 (43.22% identity, 57.37% similarity) |
| | | | | | | | | Vip4Aa1 (42.41% identity, 56.91% similarity) |
| APG04418 | 124 | 125, 126 | | | Cry22 | 50, 55, 60, 65, 70, 75, | 65, 70, 75, 80, 85, 90, | APG09096 (57.34% identity, 70.45% similarity) |
| | | | | | | 80, 85, 90, 95, 96, 97, | 95, 96, 97, 98, 99 | APG00490 - US_2016_0177333_A1-143 (47.28% |
| | | | | | | 98, 99 | | identity, 61.35% similarity) |
| | | | | | | | | APG00490.1 - US_2016_0177333_A1-144 (47.28% |
| | | | | | | | | identity, 61.35% similarity) |
| | | | | | | | | WP_017154368.1 (46.72% identity, 61.54% |
| | | | | | | | | similarity) |
| | | | | | | | | Cry22Bb1 (37.55% identity, 47.74% similarity) |
| APG04431 | 127 | 128 | | | MTX | 90, 95, 96, 97, 98, 99 | 95, 96, 97, 98, 99 | US_2013_0227743_A1-120 (87.02% identity, 91.35% |
| | | | | | | | | similarity) |
| | | | | | | | | APG00202 - US_2016_0304898_A1-195 (85.61% |
| | | | | | | | | identity, 91.92% similarity) |
| | | | | | | | | APG00208 - US_2016_0304898_A1-201 (81.66% |
| | | | | | | | | identity, 89.95% similarity) |
| | | | | | | | | APG00352 (75.19% identity, 85.32% similarity) |
| | | | | | | | | J8F337_BACCE (74.11% identity, 82.49% similarity) |
| | | | | | | | | US_2013_0227743_A1-122 (32.52% identity, 48.66% |
| | | | | | | | | similarity) |
| APG04460 | 129 | 130 | | 131 | Cry | 55, 60, 65, 70, 75, 80, | 65, 70, 75, 80, 85, 90, | WP_050845419.1 (54.74% identity, 62.47% |
| | | | | | | 85, 90, 95, 96, 97, 98, | 95, 96, 97, 98, 99 | similarity) |
| | | | | | | 99 | | AFM73704.1 (50.07% identity, 57.32% similarity) |
| | | | | | | | | AGP18009.1 (39.08% identity, 49.57% similarity) |
| | | | | | | | | Cry53Aa1 (33.75% identity, 46.50% similarity) |
| APG04477 | 132 | 133 | | | MTX | 60, 65, 70, 75, 80, 85, | 75, 80, 85, 90, 95, 96, | APG00569 (91.67% identity, 94.05% similarity) |
| | | | | | | 90, 95, 96, 97, 98, 99 | 97, 98, 99 | APG00938 (89.88% identity, 94.05% similarity) |
| | | | | | | | | APG00563 (84.23% identity, 89.29% similarity) |
| | | | | | | | | APG09055 (81.85% identity, 88.39% similarity) |
| | | | | | | | | APG00794 (78.64% identity, 86.65% similarity) |
| | | | | | | | | APG00590 - US_2016_0311864_A1-193 (58.60% |
| | | | | | | | | identity, 74.64% similarity) |
| | | | | | | | | C3GC23_BACTU (57.14% identity, 70.54% |
| | | | | | | | | similarity) |
| | | | | | | | | APG00146 - US_2016_0304898_A1-166 (57.14% |
| | | | | | | | | identity, 70.24% similarity) |
| | | | | | | | | ANN35739.1 (55.92% identity, 71.60% similarity) |
| APG04597 | 134 | 135 | | | MACPF | 40, 45, 50, 55, 60, 65, | 50, 55, 60, 65, 70, 75, | APG03726 (73.33% identity, 73.63% similarity) |
| | | | | | | 70, 75, 80, 85, 90, 95, | 80, 85, 90, 95, 96, 97, | APG02912 (54.65% identity, 62.48% similarity) |
| | | | | | | 96, 97, 98, 99 | 98, 99 | WP_019961352.1 (36.26% identity, 47.22% |
| | | | | | | | | similarity) |
| | | | | | | | | WP_012039071.1 (28.20% identity, 41.13% |
| | | | | | | | | similarity) |
| | | | | | | | | WP_046018755.1 (26.20% identity, 37.89% |
| | | | | | | | | similarity) |
| | | | | | | | | WP_012145116.1 (25.29% identity, 41.37% |
| | | | | | | | | similarity) |
| APG04598 | 136 | | | | MTX | 30, 35, 40, 45, 50, 55, | 50, 55, 60, 65, 70, 75, | APG04483 (80.66% identity, 92.79% similarity) |
| | | | | | | 60, 65, 70, 75, 80, 85, | 80, 85, 90, 95, 96, 97, | APG06465 (80.33% identity, 92.46% similarity) |
| | | | | | | 90, 95, 96, 97, 98, 99 | 98, 99 | APG00696 (80.00% identity, 92.13% similarity) |
| | | | | | | | | APG01882 (79.41% identity, 91.83% similarity) |
| | | | | | | | | APG03715 (76.56% identity, 87.19% similarity) |
| | | | | | | | | APG00016.1 - US_2016_0304898_A1-27 (47.39% |
| | | | | | | | | identity, 62.42% similarity) |
| | | | | | | | | APG00016 - US_2016_0304898_A1-26 (45.03% |
| | | | | | | | | identity, 59.32% similarity) |
| | | | | | | | | AGP18028.1 (26.75% identity, 45.54% similarity) |
| | | | | | | | | Cry23Aa1 (25.77% identity, 42.64% similarity) |
| APG04640 | 137 | 138 | | | MTX | 90, 95, 96, 97, 98, 99 | 95, 96, 97, 98, 99 | APG06161 (92.64% identity, 96.01% similarity) |
| | | | | | | | | WP_016099386.1 (85.58% identity, 90.18% |
| | | | | | | | | similarity) |
| | | | | | | | | APG04804 (70.55% identity, 84.05% similarity) |
| | | | | | | | | WP_016084062.1 (69.33% identity, 82.21% |
| | | | | | | | | similarity) |
| | | | | | | | | WP_016085044.1 (69.33% identity, 82.21% |
| | | | | | | | | similarity) |
| | | | | | | | | WP_016084449.1 (69.02% identity, 82.21% |
| | | | | | | | | similarity) |
| | | | | | | | | APG02293 (68.40% identity, 81.29% similarity) |
| | | | | | | | | APG07036 (66.56% identity, 78.83% similarity) |
| APG04682 | 139 | 140 | | | Cry | 35, 40, 45, 50, 55, 60, | 50, 55, 60, 65, 70, 75, | US_2006_0212965_A1-4 (33.12% identity, 48.12% |
| | | | | | | 65, 70, 75, 80, 85, 90, | 80, 85, 90, 95, 96, 97, | similarity) |
| | | | | | | 95, 96, 97, 98, 99 | 98, 99 | US_2011_0203014-17 (32.15% identity, 48.40% |
| | | | | | | | | similarity) |
| | | | | | | | | CA_2790023-17 (32.15% identity, 48.40% similarity) |
| | | | | | | | | Cry21Ga1 (29.61% identity, 46.61% similarity) |
| APG04720 | 141 | 142 | | | MTX | 75, 80, 85, 90, 95, 96, | 85, 90, 95, 96, 97, 98, | APG00036 - US_2016_0304898_A1-60 (94.98% |
| | | | | | | 97, 98, 99 | 99 | identity, 95.65% similarity) |
| | | | | | | | | APG00036.1 - US_2016_0304898_A1-61 (94.65% |
| | | | | | | | | identity, 95.65% similarity) |
| | | | | | | | | APG00036.2 - US_2016_0304898_A1-229 (93.98% |
| | | | | | | | | identity, 94.65% similarity) |
| | | | | | | | | APG08088 (79.93% identity, 86.96% similarity) |
| | | | | | | | | APG00201 - US_2016_0304898_A1-193 (76.72% |
| | | | | | | | | identity, 83.93% similarity) |
| | | | | | | | | APG01506 (76.16% identity, 84.44% similarity) |
| | | | | | | | | APG00566 (75.24% identity, 84.04% similarity) |
| | | | | | | | | APG02279 (75.16% identity, 83.66% similarity) |
| | | | | | | | | APG00847 - US_2016_0304898_A1-223 (75.08% |
| | | | | | | | | identity, 82.95% similarity) |
| | | | | | | | | J8YPM2_BACCE (73.75% identity, 83.72% |
| | | | | | | | | similarity) |
| | | | | | | | | APG04076 (72.94% identity, 83.83% similarity) |
| | | | | | | | | APG06690 (72.79% identity, 82.62% similarity) |
| APG04725 | 143 | 144 | | | Cyt | 85, 90, 95, 96, 97, 98, | 90, 95, 96, 97, 98, 99 | APG00126.1 - US_2016_0304898_A1-154 (82.91% |
| | | | | | | 99 | | identity, 93.16% similarity) |
| | | | | | | | | APG00126 - US_2016_0304898_A1-153 (80.83% |
| | | | | | | | | identity, 90.83% similarity) |
| | | | | | | | | WP_016110460.1 (80.08% identity, 89.63% |
| | | | | | | | | similarity) |
| | | | | | | | | APG00437 (78.00% identity, 86.00% similarity) |
| | | | | | | | | APG08631 (75.60% identity, 85.20% similarity) |
| | | | | | | | | APG07961 (60.58% identity, 78.42% similarity) |
| | | | | | | | | APG08230 (57.14% identity, 75.79% similarity) |
| | | | | | | | | APG00128 - US_2016_0304898_A1-157 (56.85% |
| | | | | | | | | identity, 73.86% similarity) |
| | | | | | | | | APG00177 - US_2016_0311864_A1-52 (56.75% |
| | | | | | | | | identity, 75.00% similarity) |
| | | | | | | | | APG00121 - US_2016_0311864_A1-29 (52.92% |
| | | | | | | | | identity, 67.88% similarity) |
| | | | | | | | | Cyt2Ca1 (40.87% identity, 56.75% similarity) |
| APG04804 | 145 | 146 | | | MTX | 70, 75, 80, 85, 90, 95, | 85, 90, 95, 96, 97, 98, 99 | APG06161 (70.86% identity, 84.36% similarity) |
| | | | | | | 96, 97, 98, 99 | | APG04640 (70.55% identity, 84.05% similarity) |
| | | | | | | | | WP_016084062.1 (69.63% identity, 81.60% |
| | | | | | | | | similarity) |
| | | | | | | | | WP_016085044.1 (69.33% identity, 81.29% |
| | | | | | | | | similarity) |
| | | | | | | | | APG02293 (69.02% identity, 80.98% similarity) |
| | | | | | | | | WP_016084449.1 (69.02% identity, 80.98% |
| | | | | | | | | similarity) |
| | | | | | | | | WP_000823322.1 (68.40% identity, 80.98% |
| | | | | | | | | similarity) |
| | | | | | | | | APG07036 (66.87% identity, 77.30% similarity) |
| APG04807 | 147 | 148 | | | MTX | 25, 30, 35, 40, 45, 50, | 45, 50, 55, 60, 65, 70, | APG08307 (51.20% identity, 65.87% similarity) |
| | | | | | | 55, 60, 65, 70, 75, 80, | 75, 80, 85, 90, 95, 96, | US_2013_0227743_A1-114 (23.26% identity, 40.31% |
| | | | | | | 85, 90, 95, 96, 97, 98, | 97, 98, 99 | similarity) |
| | | | | | | 99 | | AGP17988.1 (14.71% identity, 24.22% similarity) |
| APG04931 | 149 | 150 | | | Vip4 | 65, 70, 75, 80, 85, 90, | 80, 85, 90, 95, 96, 97, | WP_000769710.1 (63.94% identity, 72.61% |
| | | | | | | 95, 96, 97, 98, 99 | 98, 99 | similarity) |
| | | | | | | | | WP_048561796.1 (63.31% identity, 75.17% |
| | | | | | | | | similarity) |
| | | | | | | | | SCL96146.1 (63.31% identity, 74.88% similarity) |
| | | | | | | | | APG09545 (59.26% identity, 70.37% similarity) |
| | | | | | | | | Vip4Aa1 (58.28% identity, 73.05% similarity) |
| | | | | | | | | APG09984 (55.58% identity, 69.35% similarity) |
| | | | | | | | | APG00106 - US_2016_0304898_A1-134 (55.13% |
| | | | | | | | | identity, 69.14% similarity) |
| | | | | | | | | APG07790 (51.38% identity, 65.84% similarity) |
| APG04978 | 151 | | | | MTX | 25, 30, 35, 40, 45, 50, | 45, 50, 55, 60, 65, 70, | APG08043 (31.11% identity, 45.71% similarity) |
| | | | | | | 55, 60, 65, 70, 75, 80, | 75, 80, 85, 90, 95, 96, | APG07738 (30.89% identity, 43.12% similarity) |
| | | | | | | 85, 90, 95, 96, 97, 98, | 97, 98, 99 | APG02633 (24.41% identity, 42.37% similarity) |
| | | | | | | 99 | | APG06768 (23.89% identity, 40.76% similarity) |
| | | | | | | | | Cry33Aa1 (23.80% identity, 36.14% similarity) |
| | | | | | | | | Cry51Aa1 (23.80% identity, 35.84% similarity) |
| | | | | | | | | Cry64Aa1 (23.44% identity, 40.63% similarity) |
| APG05025 | 152 | 153 | | | Vip3 | 25, 30, 35, 40, 45, 50, | 40, 45, 50, 55, 60, 65, | APG00071 - US_2016_0311864_A1-8 (88.49% |
| | | | | | | 55, 60, 65, 70, 75, 80, | 70, 75, 80, 85, 90, 95, | identity, 93.53% similarity) |
| | | | | | | 85, 90, 95, 96, 97, 98, | 96, 97, 98, 99 | APG00150 - US_2016_0311864_A1-35 (88.31% |
| | | | | | | 99 | | identity, 93.53% similarity) |
| | | | | | | | | APG00071.1 - US_2016_0311864_A1-9 (87.95% |
| | | | | | | | | identity, 92.99% similarity) |
| | | | | | | | | Vip3Aa22 (22.09% identity, 35.17% similarity) |
| APG05034 | 154 | 155, 156 | | | Cry | 40, 45, 50, 55, 60, 65, | 60, 65, 70, 75, 80, 85, | APG00061 - US_2016_0304898_A1-92 (44.40% |
| | | | | | | 70, 75, 80, 85, 90, 95, | 90, 95, 96, 97, 98, 99 | identity, 59.43% similarity) |
| | | | | | | 96, 97, 98, 99 | | WP_048536348.1 (39.82% identity, 55.34% |
| | | | | | | | | similarity) |
| | | | | | | | | APG00206 - US_2016_0304898_A1-199 (37.68% |
| | | | | | | | | identity, 53.09% similarity) |
| | | | | | | | | Cry70Ba1 (21.94% identity, 34.09% similarity) |
| APG05045 | 157 | 158 | | | MTX | 40, 45, 50, 55, 60, 65, | 60, 65, 70, 75, 80, 85, | WP_048178060.1 (35.81% identity, 55.07% |
| | | | | | | 70, 75, 80, 85, 90, 95, | 90, 95, 96, 97, 98, 99 | similarity) |
| | | | | | | 96, 97, 98, 99 | | WP_004999216.1 (34.85% identity, 55.70% |
| | | | | | | | | similarity) |
| | | | | | | | | WP_011306610.1 (34.85% identity, 54.72% |
| | | | | | | | | similarity) |
| | | | | | | | | WP_048041904.1 (34.43% identity, 53.11% |
| | | | | | | | | similarity) |
| APG05084 | 159 | 160 | | | MTX | 100 | 100 | WP_025150761.1 (100.00% identity, 100.00% |
| | | | | | | | | similarity) |
| | | | | | | | | APG02921 (89.74% identity, 93.91% similarity) |
| | | | | | | | | SFS68380.1 (89.17% identity, 93.95% similarity) |
| | | | | | | | | APG06989 (88.14% identity, 93.27% similarity) |
| | | | | | | | | APG08990 (88.14% identity, 93.27% similarity) |
| | | | | | | | | APG04226 (86.22% identity, 92.31% similarity) |
| | | | | | | | | APG05969 (86.22% identity, 91.99% similarity) |
| | | | | | | | | WP_016132978.1 (81.09% identity, 88.78% |
| | | | | | | | | similarity) |
| | | | | | | | | APG05651 (81.09% identity, 88.14% similarity) |
| | | | | | | | | APG02782 (50.59% identity, 64.20% similarity) |
| | | | | | | | | Cry55Aa1 (17.49% identity, 33.00% similarity) |
| APG05328 | 161 | | | | MTX | 60, 65, 70, 75, 80, 85, | 70, 75, 80, 85, 90, 95, | APG00559.2 - US_2016_0311864_A1-361 (65.71% |
| | | | | | | 90, 95, 96, 97, 98, 99 | 96, 97, 98, 99 | identity, 71.18% similarity) |
| | | | | | | | | APG00067 - US_2016_0311864_A1-7 (63.82% |
| | | | | | | | | identity, 70.29% similarity) |
| | | | | | | | | APG00559 - US_2016_0311864_A1-191 (61.67% |
| | | | | | | | | identity, 66.86% similarity) |
| | | | | | | | | APG00559.1 - US_2016_0311864_A1-360 (61.38% |
| | | | | | | | | identity, 66.86% similarity) |
| | | | | | | | | APG00954 (59.77% identity, 66.29% similarity) |
| | | | | | | | | APG00408 - US_2016_0311864_A1-171 (59.60% |
| | | | | | | | | identity, 66.48% similarity) |
| | | | | | | | | APG08088 (56.30% identity, 66.86% similarity) |
| | | | | | | | | APG08589 (56.21% identity, 69.23% similarity) |
| | | | | | | | | APG00260 (55.49% identity, 64.45% similarity) |
| | | | | | | | | US_2013_0227743_A1-100 (55.03% identity, 65.68% |
| | | | | | | | | similarity) |
| | | | | | | | | APG00006 - US_2016_0304898_A1-9 (54.99% |
| | | | | | | | | identity, 64.96% similarity) |
| | | | | | | | | APG09682 (54.34% identity, 65.90% similarity) |
| APG05370 | 162 | 163 | | | Cry32 | 85, 90, 95, 96, 97, 98, | 90, 95, 96, 97, 98, 99 | APG00054 - US_2016_0304898_A1-84 (84.33% |
| | | | | | | 99 | | identity, 90.10% similarity) |
| | | | | | | | | US_2016_0017363_A1-32 (83.63% identity, 89.79% |
| | | | | | | | | similarity) |
| | | | | | | | | US_2016_0017363_A1-33 (82.85% identity, 88.93% |
| | | | | | | | | similarity) |
| | | | | | | | | APG00310 (76.34% identity, 83.10% similarity) |
| | | | | | | | | APG00974 (72.73% identity, 81.74% similarity) |
| | | | | | | | | APG00068 - US_2016_0177333_A1-35 (70.36% |
| | | | | | | | | identity, 80.65% similarity) |
| | | | | | | | | Cry32Ea1 (62.67% identity, 72.61% similarity) |
| | | | | | | | | APG06739 (61.77% identity, 71.90% similarity) |
| | | | | | | | | APG05930 (59.88% identity, 69.84% similarity) |
| | | | | | | | | APG00673 (59.69% identity, 69.34% similarity) |
| | | | | | | | | APG07100 (53.36% identity, 66.57% similarity) |
| | | | | | | | | APG01329 (53.33% identity, 64.47% similarity) |
| APG05384 | 164 | 165, 166 | | | MTX | 40, 45, 50, 55, 60, 65, | 55, 60, 65, 70, 75, 80, | APG06912 (78.19% identity, 84.70% similarity) |
| | | | | | | 70, 75, 80, 85, 90, 95, | 85, 90, 95, 96, 97, 98, | US_2013_0227743_A1-112 (36.24% identity, 54.50% |
| | | | | | | 96, 97, 98, 99 | 99 | similarity) |
| | | | | | | | | US_2013_0227743_A1-114 (35.42% identity, 52.34% |
| | | | | | | | | similarity) |
| | | | | | | | | AIK29697.1 (24.56% identity, 41.01% similarity) |
| | | | | | | | | ADK08315.1 (24.35% identity, 40.05% similarity) |
| APG05506 | 167 | | | | MTX | 80, 85, 90, 95, 96, 97, | 90, 95, 96, 97, 98, 99 | AGA40030.1 (79.49% identity, 88.20% similarity) |
| | | | | | | 98, 99 | | US_8829279_B2-37 (79.28% identity, 86.46% |
| | | | | | | | | similarity) |
| | | | | | | | | APG03760 (64.25% identity, 77.09% similarity) |
| | | | | | | | | APG05634 (62.29% identity, 75.98% similarity) |
| | | | | | | | | APG00224 (59.83% identity, 72.85% similarity) |
| | | | | | | | | APG00846 (59.67% identity, 74.31% similarity) |
| | | | | | | | | APG00609 (58.77% identity, 72.14% similarity) |
| | | | | | | | | US_8829279_B2-27 (51.10% identity, 66.30% |
| | | | | | | | | similarity) |
| | | | | | | | | Q45728_BACTU (44.29% identity, 58.97% similarity) |
| APG05615 | 168 | 169 | | | MTX | 100 | 100 | J8Y0J8_BACCE (99.70% identity, 99.70% similarity) |
| | | | | | | | | SCA97082.1 (98.80% identity, 99.40% similarity) |
| | | | | | | | | C3ICE4_BACTU (98.49% identity, 99.40% |
| | | | | | | | | similarity) |
| | | | | | | | | J7XTF7_BACCE (92.17% identity, 92.77% similarity) |
| APG05619 | 170 | | | | Bin | 35, 40, 45, 50, 55, 60, | 50, 55, 60, 65, 70, 75, | APG00192 - US_2016_0311864_A1-64 (71.83% |
| | | | | | | 65, 70, 75, 80, 85, 90, | 80, 85, 90, 95, 96, 97, | identity, 83.20% similarity) |
| | | | | | | 95, 96, 97, 98, 99 | 98, 99 | APG00183 - US_2016_0177333_A1-84 (40.25% |
| | | | | | | | | identity, 58.48% similarity) |
| | | | | | | | | C2Q549_BACCE (32.49% identity, 47.1% similarity) |
| | | | | | | | | Cry35Ab2 (23.98% identity, 39.37% similarity) |
| APG05651 | 171 | 172 | | | MTX | 100 | 100 | WP_016131662.1 (100.00% identity, 100.00% |
| | | | | | | | | similarity) |
| | | | | | | | | WP_016113347.1 (96.45% identity, 98.39% |
| | | | | | | | | similarity) |
| | | | | | | | | WP_016132978.1 (96.13% identity, 98.71% |
| | | | | | | | | similarity) |
| | | | | | | | | APG05969 (83.01% identity, 91.67% similarity) |
| | | | | | | | | APG02921 (82.69% identity, 89.42% similarity) |
| | | | | | | | | APG04226 (82.37% identity, 90.71% similarity) |
| | | | | | | | | APG08990 (82.37% identity, 89.74% similarity) |
| | | | | | | | | APG06989 (81.73% identity, 89.42% similarity) |
| | | | | | | | | APG05084 (81.09% identity, 88.14% similarity) |
| | | | | | | | | APG02782 (51.49% identity, 66.07% similarity) |
| | | | | | | | | Cry55Aa1 (19.55% identity, 34.59% similarity) |
| APG05653 | 173 | 174 | | | MTX | 45, 50, 55, 60, 65, 70, | 60, 65, 70, 75, 80, 85, | WP_065486124.1 (40.51% identity, 56.94% |
| | | | | | | 75, 80, 85, 90, 95, 96, | 90, 95, 96, 97, 98, 99 | similarity) |
| | | | | | | 97, 98, 99 | | ANS51604.1 (40.06% identity, 56.53% similarity) |
| | | | | | | | | WP_001267112.1 (39.37% identity, 54.02% |
| | | | | | | | | similarity) |
| | | | | | | | | Cry55Aa1 (20.98% identity, 36.1% similarity) |
| APG05658 | 175 | 176 | | | MTX | 35, 40, 45, 50, 55, 60, | 50, 55, 60, 65, 70, 75, | AGP17985.1 (31.72% identity, 47.46% similarity) |
| | | | | | | 65, 70, 75, 80, 85, 90, | 80, 85, 90, 95, 96, 97, | WP_063226258.1 (31.70% identity, 49.39% |
| | | | | | | 95, 96, 97, 98, 99 | 98, 99 | similarity) |
| | | | | | | | | US_2016_0311864_A1-267 (31.34% identity, 46.65% |
| | | | | | | | | similarity) |
| | | | | | | | | SFT24477.1 (30.64% identity, 47.55% similarity) |
| APG05715 | 177 | 178 | | | Bin | 90, 95, 96, 97, 98, 99 | 95, 96, 97, 98, 99 | APG02445 (96.73% identity, 98.99% similarity) |
| | | | | | | | | APG04176 (93.72% identity, 96.98% similarity) |
| | | | | | | | | WP_070144216.1 (88.44% identity, 93.22% |
| | | | | | | | | similarity) |
| | | | | | | | | APG00806 (88.19% identity, 93.97% similarity) |
| | | | | | | | | APG00212.1 - US_2016_0311864_A1-259 (87.31% |
| | | | | | | | | identity, 92.54% similarity) |
| | | | | | | | | SDE18889.1 (86.25% identity, 93.75% similarity) |
| | | | | | | | | APG00212 - US_2016_0311864_A1-75 (85.40% |
| | | | | | | | | identity, 90.51% similarity) |
| | | | | | | | | APG07818 (82.34% identity, 89.55% similarity) |
| | | | | | | | | APG00619 - US_2016_0311864_A1-199 (82.13% |
| | | | | | | | | identity, 89.08% similarity) |
| | | | | | | | | APG00592 - US_2016_0311864_A1-195 (82.00% |
| | | | | | | | | identity, 88.08% similarity) |
| | | | | | | | | APG00798 - US_2016_0311864_A1-219 (80.10% |
| | | | | | | | | identity, 87.38% similarity) |
| | | | | | | | | APG01790 (51.47% identity, 65.76% similarity) |
| | | | | | | | | Cry49Aa1 (20.08% identity, 33.53% similarity) |
| APG05804 | 179 | | | | MTX (Cry64) | 85, 90, 95, 96, 97, 98, | 90, 95, 96, 97, 98, 99 | Cry64Aa1 (84.92% identity, 89.18% similarity) |
| | | | | | | 99 | | APG00450 (82.95% identity, 86.23% similarity) |
| | | | | | | | | APG00501 (73.44% identity, 75.08% similarity) |
| APG05810 | 180 | 181 | | | Cry | 40, 45, 50, 55, 60, 65, | 55, 60, 65, 70, 75, 80, | APG00558 (71.50% identity, 81.09% similarity) |
| | | | | | | 70, 75, 80, 85, 90, 95, | 85, 90, 95, 96, 97, 98, | V9P857_BACTU (37.83% identity, 50.12% |
| | | | | | | 96, 97, 98, 99 | 99 | similarity) |
| | | | | | | | | Cry24Ba1 (33.96% identity, 48.44% similarity) |
| APG05924 | 182 | 183 | | | Vip4 | 45, 50, 55, 60, 65, 70, | 60, 65, 70, 75, 80, 85, | WP_000769710.1 (42.54% identity, 57.16% |
| | | | | | | 75, 80, 85, 90, 95, 96, | 90, 95, 96, 97, 98, 99 | similarity) |
| | | | | | | 97, 98, 99 | | SCL96146.1 (40.53% identity, 56.53% similarity) |
| | | | | | | | | SCC38903.1 (40.45% identity, 55.73% similarity) |
| | | | | | | | | Vip4Aa1 (40.32% identity, 56.57% similarity) |
| APG05930 | 184 | 185 | | | Cry32 | 70, 75, 80, 85, 90, 95, | 80, 85, 90, 95, 96, 97, | APG00673 (89.88% identity, 91.97% similarity) |
| | | | | | | 96, 97, 98, 99 | 98, 99 | Cry32Ea1 (66.12% identity, 75.68% similarity) |
| | | | | | | | | APG00974 (61.29% identity, 71.10% similarity) |
| | | | | | | | | APG05370 (59.88% identity, 69.84% similarity) |
| | | | | | | | | APG00054 - US_2016_0304898_A1-84 (59.38% |
| | | | | | | | | identity, 70.35% similarity) |
| | | | | | | | | APG06739 (58.86% identity, 69.35% similarity) |
| | | | | | | | | APG00310 (58.80% identity, 70.22% similarity) |
| | | | | | | | | APG00068 - US_2016_0177333_A1-35 (57.82% |
| | | | | | | | | identity, 69.46% similarity) |
| | | | | | | | | APG07100 (53.27% identity, 65.33% similarity) |
| | | | | | | | | APG03519 (50.81% identity, 61.95% similarity) |
| APG05978 | 186 | 187 | | | Cry | 95, 96, 97, 98, 99 | 96, 97, 98, 99 | APG09936 (93.61% identity, 94.52% similarity) |
| | | | | | | | | WP_049738340.1 (93.38% identity, 95.21% |
| | | | | | | | | similarity) |
| | | | | | | | | SEE67477.1 (37.28% identity, 58.26% similarity) |
| | | | | | | | | WP_036155538.1 (30.74% identity, 50.11% |
| | | | | | | | | similarity) |
| | | | | | | | | EXX63903.1 (28.82% identity, 48.39% similarity) |
| APG06051 | 188 | | | | Bin | 90, 95, 96, 97, 98, 99 | 90, 95, 96, 97, 98, 99 | R8CM29_BACCE (86.91% identity, 86.91% |
| | | | | | | | | similarity) |
| | | | | | | | | APG00215 - US_2016_0311864_A1-78 (63.23% |
| | | | | | | | | identity, 71.59% similarity) |
| | | | | | | | | APG00880 (59.28% identity, 68.98% similarity) |
| | | | | | | | | APG00386 - US_2016_0311864_A1-158 (55.96% |
| | | | | | | | | identity, 66.48% similarity) |
| | | | | | | | | Cry35Ab4 (22.63% identity, 35.79% similarity) |
| APG06161 | 189 | 190 | | | MTX | 90, 95, 96, 97, 98, 99 | 95, 96, 97, 98, 99 | APG04640 (92.64% identity, 96.01% similarity) |
| | | | | | | | | WP_016099386.1 (86.81% identity, 91.72% |
| | | | | | | | | similarity) |
| | | | | | | | | APG04804 (70.86% identity, 84.36% similarity) |
| | | | | | | | | WP_016084062.1 (68.71% identity, 82.52% |
| | | | | | | | | similarity) |
| | | | | | | | | WP_016085044.1 (68.71% identity, 82.52% |
| | | | | | | | | similarity) |
| | | | | | | | | WP_016084449.1 (68.40% identity, 82.21% |
| | | | | | | | | similarity) |
| | | | | | | | | APG02293 (68.10% identity, 81.60% similarity) |
| | | | | | | | | APG07036 (66.26% identity, 78.83% similarity) |
| APG06176 | 191 | 192 | | | MTX | 30, 35, 40, 45, 50, 55, | 45, 50, 55, 60, 65, 70, | Q5PXQ3_BACUD (26.06% identity, 44.24% |
| | | | | | | 60, 65, 70, 75, 80, 85, | 75, 80, 85, 90, 95, 96, | similarity) |
| | | | | | | 90, 95, 96, 97, 98, 99 | 97, 98, 99 | |
| APG06253 | 193 | 194 | | | Cry32 | 45, 50, 55, 60, 65, 70, | 60, 65, 70, 75, 80, 85, | APG00188 - US_2016_0311864_A1-57 (95.03% |
| | | | | | | 75, 80, 85, 90, 95, 96, | 90, 95, 96, 97, 98, 99 | identity, 96.51% similarity) |
| | | | | | | 97, 98, 99 | | APG07803 (88.97% identity, 93.37% similarity) |
| | | | | | | | | APG00007 - US_2016_0304898_A1-11 (78.08% |
| | | | | | | | | identity, 85.54% similarity) |
| | | | | | | | | APG00007.1 - US_2016_0304898_A1-12 (77.54% |
| | | | | | | | | identity, 84.77% similarity) |
| | | | | | | | | APG01915 (74.69% identity, 83.54% similarity) |
| | | | | | | | | APG01780 (69.06% identity, 78.99% similarity) |
| | | | | | | | | Cry32Ca1 (44.29% identity, 57.00% similarity) |
| APG06364 | 195 | 196 | | | MTX | 65, 70, 75, 80, 85, 90, | 70, 75, 80, 85, 90, 95, | US_2013_0227743_A1_124 (63.95% identity, 66.57% |
| | | | | | | 95, 96, 97, 98, 99 | 96, 97, 98, 99 | similarity) |
| | | | | | | | | R8R7L4_BACCE (59.33% identity, 67.28% |
| | | | | | | | | similarity) |
| | | | | | | | | SDW71198.1 (39.34% identity, 51.80% similarity) |
| | | | | | | | | Cry55Aa1 (24.34% identity, 39.42% similarity) |
| APG06372 | 197 | 198, 199 | | | MTX | 98, 99 | 100 | WP_061657790.1 (97.52% identity, 99.01% |
| | | | | | | | | similarity) |
| | | | | | | | | W8YCZ9_BACTU (97.27% identity, 98.76% |
| | | | | | | | | similarity) |
| | | | | | | | | APG00129 - US_2016_0304898_A1-158 (96.53% |
| | | | | | | | | identity, 98.76% similarity) |
| | | | | | | | | APG00129.1 - US_2016_0304898_A1-159 (96.28% |
| | | | | | | | | identity, 98.76% similarity) |
| | | | | | | | | APG07748 (82.61% identity, 86.73% similarity) |
| | | | | | | | | APG00681 (62.56% identity, 74.43% similarity) |
| | | | | | | | | APG00304 (59.01% identity, 71.36% similarity) |
| | | | | | | | | APG00366 (58.87% identity, 73.89% similarity) |
| | | | | | | | | APG03484 (57.79% identity, 69.53% similarity) |
| APG06428 | 200 | | | 201 | Cry30 | 80, 85, 90, 95, 96, 97, | 90, 95, 96, 97, 98, 99 | WP_050845409.1 (78.87% identity, 85.76% |
| | | | | | | 98, 99 | | similarity) |
| | | | | | | | | Cry30Ga2 (73.55% identity, 79.94% similarity) |
| | | | | | | | | APG00565 (65.58% identity, 74.08% similarity) |
| | | | | | | | | APG00972 (64.43% identity, 74.23% similarity) |
| APG06431 | 202 | 203 | | | MTX | 100 | 100 | WP_058211730.1 (100.00% identity, 100.00% |
| | | | | | | | | similarity) |
| | | | | | | | | APG00410 (98.75% identity, 99.37% similarity) |
| | | | | | | | | W7BXB5_9LIST (26.91% identity, 44.48% similarity) |
| | | | | | | | | S4G0I5_ENTFL (26.71% identity, 47.18% similarity) |
| | | | | | | | | AAB36655.1 (25.14% identity, 43.17% similarity) |
| APG06630 | 204 | 205, 206 | | | Cry42 | 50, 55, 60, 65, 70, 75, | 60, 65, 70, 75, 80, 85, | APG00897 (94.07% identity, 96.35% similarity) |
| | | | | | | 80, 85, 90, 95, 96, 97, | 90, 95, 96, 97, 98, 99 | APG00044.1 - US_2016_0304898_A1-72 (46.26% |
| | | | | | | 98, 99 | | identity, 61.23% similarity) |
| | | | | | | | | Cry42Aa1 (46.23% identity, 56.57% similarity) |
| APG06650 | 207 | 208 | | | Cry32 | 90, 95, 96, 97, 98, 99 | 95, 96, 97, 98, 99 | Cry32Ca1 (88.58% identity, 92.34% similarity) |
| | | | | | | | | APG00687 (82.88% identity, 89.26% similarity) |
| | | | | | | | | APG00056 - US_2016_0311864_A1-1 (53.22% |
| | | | | | | | | identity, 65.18% similarity) |
| | | | | | | | | APG00430 (53.17% identity, 63.39% similarity) |
| | | | | | | | | APG03519 (52.74% identity, 65.03% similarity) |
| | | | | | | | | APG05370 (52.13% identity, 64.41% similarity) |
| | | | | | | | | APG00710 (51.72% identity, 62.18% similarity) |
| | | | | | | | | APG01329 (50.69% identity, 62.51% similarity) |
| | | | | | | | | APG06739 (50.66% identity, 61.45% similarity) |
| APG06690 | 209 | | | | MTX | 80, 85, 90, 95, 96, 97, | 90, 95, 96, 97, 98, 99 | US_2013_0227743_A1-100 (78.84% identity, 87.03% |
| | | | | | | 98, 99 | | similarity) |
| | | | | | | | | J8YPM2_BACCE (78.16% identity, 86.69% |
| | | | | | | | | similarity) |
| | | | | | | | | APG08718 (78.16% identity, 86.69% similarity) |
| | | | | | | | | APG08241 (78.16% identity, 85.67% similarity) |
| | | | | | | | | APG07639 (77.18% identity, 85.23% similarity) |
| | | | | | | | | APG02279 (76.16% identity, 84.44% similarity) |
| | | | | | | | | APG09682 (74.58% identity, 86.62% similarity) |
| | | | | | | | | APG00036.2 - US_2016_0304898_A1-229 (74.50% |
| | | | | | | | | identity, 84.11% similarity) |
| | | | | | | | | APG01506 (74.42% identity, 83.72% similarity) |
| | | | | | | | | APG00036 - US_2016_0304898_A1-60 (73.77% |
| | | | | | | | | identity, 83.28% similarity) |
| | | | | | | | | APG04720 (72.79% identity, 82.62% similarity) |
| | | | | | | | | APG04076 (72.37% identity, 84.21% similarity) |
| | | | | | | | | US_2013_0227743_A1-60 (40.07% identity, 47.35% |
| | | | | | | | | similarity) |
| APG06739 | 210 | 211, 212 | 213 | | Cry32 | 65, 70, 75, 80, 85, 90, | 75, 80, 85, 90, 95, 96, | US_2011_0203014-27 (63.81% identity, 73.89% |
| | | | | | | 95, 96, 97, 98, 99 | 97, 98, 99 | similarity) |
| | | | | | | | | APG05370 (61.77% identity, 71.90% similarity) |
| | | | | | | | | APG00974 (61.71% identity, 71.71% similarity) |
| | | | | | | | | AGP18052.1 (61.28% identity, 71.27% similarity) |
| | | | | | | | | Cry32Ab1 (60.52% identity, 71.01% similarity) |
| | | | | | | | | APG00054 - US_2016_0304898_A1-84 (59.92% |
| | | | | | | | | identity, 69.20% similarity) |
| | | | | | | | | APG00469 (59.73% identity, 71.81% similarity) |
| | | | | | | | | APG00068 - US_2016_0177333_A1-35 (59.08% |
| | | | | | | | | identity, 70.38% similarity) |
| | | | | | | | | APG05930 (58.86% identity, 69.35% similarity) |
| | | | | | | | | APG00673 (58.71% identity, 68.99% similarity) |
| | | | | | | | | APG07100 (54.04% identity, 66.74% similarity) |
| | | | | | | | | APG03519 (53.25% identity, 64.35% similarity) |
| APG06768 | 214 | | | | MTX | 30, 35, 40, 45, 50, 55, | 45, 50, 55, 60, 65, 70, | US_2015_0047076_A1-12 (26.92% identity, 42.95% |
| | | | | | | 60, 65, 70, 75, 80, 85, | 75, 80, 85, 90, 95, 96, | similarity) |
| | | | | | | 90, 95, 96, 97, 98, 99 | 97, 98, 99 | US_2015_0047076_A1-8 (25.25% identity, 42.95% |
| | | | | | | | | similarity) |
| | | | | | | | | ANN35810.1 (24.44% identity, 41.80% similarity) |
| | | | | | | | | Cry45Aa (23.35% identity, 38.02% similarity) |
| APG06784 | 215 | 216 | | | MTX | 35, 40, 45, 50, 55, 60, | 55, 60, 65, 70, 75, 80, | WP_065845806.1 (32.85% identity, 51.74% |
| | | | | | | 65, 70, 75, 80, 85, 90, | 85, 90, 95, 96, 97, 98, | similarity) |
| | | | | | | 95, 96, 97, 98, 99 | 99 | SDX17518.1 (28.37% identity, 48.03% similarity) |
| | | | | | | | | SDW46809.1 (27.53% identity, 46.35% similarity) |
| | | | | | | | | WP_006918908.1 (26.69% identity, 47.80% |
| | | | | | | | | similarity) |
| APG06880 | 217 | 218 | | | MTX | 25, 30, 35, 40, 45, 50, | 40, 45, 50, 55, 60, 65, | APG09455 (78.62% identity, 84.91% similarity) |
| | | | | | | 55, 60, 65, 70, 75, 80, | 70, 75, 80, 85, 90, 95, | US_2012_0278954_A1-30 (23.26% identity, 37.79% |
| | | | | | | 85, 90, 95, 96, 97, 98, | 96, 97, 98, 99 | similarity) |
| | | | | | | 99 | | |
| APG06912 | 219 | 220, 221 | | | MTX | 40, 45, 50, 55, 60, 65, | 55, 60, 65, 70, 75, 80, | APG05384 (78.19% identity, 84.70% similarity) |
| | | | | | | 70, 75, 80, 85, 90, 95, | 85, 90, 95, 96, 97, 98, | US_2013_0227743_A1-114 (39.04% identity, 54.55% |
| | | | | | | 96, 97, 98, 99 | 99 | similarity) |
| | | | | | | | | AIK29697.1 (22.57% identity, 39.90% similarity) |
| | | | | | | | | CA_2844913-111 (37.53% identity, 52.76% |
| | | | | | | | | similarity) |
| APG06921 | 222 | | | | Cry | 30, 35, 40, 45, 50, 55, | 40, 45, 50, 55, 60, 65, | APG00084.1 - US_2016_0311864_A1-229 (64.17% |
| | | | | | | 60, 65, 70, 75, 80, 85, | 70, 75, 80, 85, 90, 95, | identity, 77.24% similarity) |
| | | | | | | 90, 95, 96, 97, 98, 99 | 96, 97, 98, 99 | APG00084.2 - US_2016_0311864_A1-16 (63.84% |
| | | | | | | | | identity, 76.72% similarity) |
| | | | | | | | | APG00084 - US_2016_0311864_A1-15 (63.24% |
| | | | | | | | | identity, 76.12% similarity) |
| | | | | | | | | APG00152 - US_2016_0311864_A1-36 (61.82% |
| | | | | | | | | identity, 70.89% similarity) |
| | | | | | | | | APG07954 (56.15% identity, 67.44% similarity) |
| | | | | | | | | APG00164 - US_2016_0311864_A1-41 (54.72% |
| | | | | | | | | identity, 69.87% similarity) |
| | | | | | | | | APG00654 (53.65% identity, 69.59% similarity) |
| | | | | | | | | Cry8Da1 (27.01% identity, 38.14% similarity) |
| APG06938 | 223 | | | | Cry | 95, 96, 97, 98, 99 | 97, 98, 99 | WP_025141994.1 (92.62% identity, 96.4% similarity) |
| | | | | | | | | C6VUR9_DYAFD (38.16% identity, 48.21% |
| | | | | | | | | similarity) |
| | | | | | | | | SFM63176.1 (37.50% identity, 54.44% similarity) |
| | | | | | | | | WP_035054034.1 (30.69% identity, 45.19% |
| | | | | | | | | similarity) |
| APG06942 | 224 | 225, 226 | 227 | | Cry32 | 95, 96, 97, 98, 99 | 96, 97, 98, 99 | US_2013_0227743_A1-48 (93.78% identity, 95.75% |
| | | | | | | | | similarity) |
| | | | | | | | | APG00912 (55.50% identity, 70.79% similarity) |
| | | | | | | | | AEH76820.1 (54.09% identity, 67.80% similarity) |
| | | | | | | | | APG00222 - US_2016_0304898_A1-203 (53.36% |
| | | | | | | | | identity, 67.48% similarity) |
| | | | | | | | | US_2010_0298211_A1-8 (50.89% identity, 63.78% |
| | | | | | | | | similarity) |
| | | | | | | | | Cry32Ea1 (43.22% identity, 57.00% similarity) |
| APG06995 | 228 | | | | Cry | 40, 45, 50, 55, 60, 65, | 55, 60, 65, 70, 75, 80, | APG00404 - US_2016_0311864_A1-169 (78.21% |
| | | | | | | 70, 75, 80, 85, 90, 95, | 85, 90, 95, 96, 97, 98, | identity, 82.78% similarity) |
| | | | | | | 96, 97, 98, 99 | 99 | WP_048536362.1 (37.08% identity, 53.29% |
| | | | | | | | | similarity) |
| | | | | | | | | AGA40057.1 (33.12% identity, 47.8% similarity) |
| | | | | | | | | WP_017762616.1 (31.05% identity, 46.9% similarity) |
| APG07016 | 229 | 230, 231 | | | Cry32 | 55, 60, 65, 70, 75, 80, | 65, 70, 75, 80, 85, 90, | APG00469 (51.61% identity, 61.67% similarity) |
| | | | | | | 85, 90, 95, 96, 97, 98, | 95, 96, 97, 98, 99 | APG06739 (50.83% identity, 60.83% similarity) |
| | | | | | | 99 | | AGP18024.1 (50.58% identity, 61.64% similarity) |
| | | | | | | | | Cry32Ab1 (50.29% identity, 60.21% similarity) |
| | | | | | | | | APG00310 (50.07% identity, 61.36% similarity) |
| APG07036 | 232 | 233 | | | MTX | 95, 96, 97, 98, 99 | 95, 96, 97, 98, 99 | APG02293 (94.17% identity, 94.79% similarity) |
| | | | | | | | | WP_050845726.1 (93.25% identity, 94.48% |
| | | | | | | | | similarity) |
| | | | | | | | | WP_000823322.1 (92.64% identity, 93.87% |
| | | | | | | | | similarity) |
| | | | | | | | | WP_016084062.1 (91.10% identity, 93.56% |
| | | | | | | | | similarity) |
| | | | | | | | | WP_016085279.1 (91.10% identity, 92.64% |
| | | | | | | | | similarity) |
| | | | | | | | | APG04804 (66.87% identity, 77.30% similarity) |
| | | | | | | | | APG04640 (66.56% identity, 78.83% similarity) |
| | | | | | | | | APG06161 (66.26% identity, 78.83% similarity) |
| APG07037 | 234 | 235 | | | Cry20 | 75, 80, 85, 90, 95, 96, | 85, 90, 95, 96, 97, 98, | Cry20Aa1 (71.96% identity, 81.01% similarity) |
| | | | | | | 97, 98, 99 | 99 | APG00810 (51.17% identity, 62.69% similarity) |
| APG07058 | 236 | 237 | | | MTX | 20, 25, 30, 35, 40, 45, | 30, 35, 40, 45, 50, 55, | AGP17988.1 (15.22% identity, 25.36% similarity) |
| | | | | | | 50, 55, 60, 65, 70, 75, | 60, 65, 70, 75, 80, 85, | |
| | | | | | | 80, 85, 90, 95, 96, 97, | 90, 95, 96, 97, 98, 99 | |
| | | | | | | 98, 99 | | |
| APG07100 | 238 | 239 | | | Cry32 | 65, 70, 75, 80, 85, 90, | 75, 80, 85, 90, 95, 96, | AGP18053.1 (62.56% identity, 74.21% similarity) |
| | | | | | | 95, 96, 97, 98, 99 | 97, 98, 99 | US_2011_0203014-19 (58.43% identity, 70.34% |
| | | | | | | | | similarity) |
| | | | | | | | | Cry32Da1 (58.12% identity, 67.82% similarity) |
| | | | | | | | | APG06739 (54.04% identity, 66.74% similarity) |
| | | | | | | | | APG00469 (53.99% identity, 66.27% similarity) |
| | | | | | | | | APG00974 (53.73% identity, 66.24% similarity) |
| | | | | | | | | APG05370 (53.36% identity, 66.57% similarity) |
| | | | | | | | | APG00068 - US_2016_0177333_A1-35 (53.35% |
| | | | | | | | | identity, 66.47% similarity) |
| | | | | | | | | APG05930 (53.23% identity, 65.13% similarity) |
| | | | | | | | | APG00673 (52.80% identity, 64.29% similarity) |
| | | | | | | | | APG00310 (52.55% identity, 65.54% similarity) |
| | | | | | | | | APG01387 (50.22% identity, 61.26% similarity) |
| APG07396 | 240 | | | | MTX | 60, 65, 70, 75, 80, 85, | 75, 80, 85, 90, 95, 96, | APG00907.1 - US_2016_0311864_A1-388 (57.28% |
| | | | | | | 90, 95, 96, 97, 98, 99 | 97, 98, 99 | identity, 71.21% similarity) |
| | | | | | | | | APG00907 - US_2016_0311864_A1-225 (56.92% |
| | | | | | | | | identity, 70.77% similarity) |
| | | | | | | | | APG00332 (56.02% identity, 70.48% similarity) |
| | | | | | | | | AGA40062.1 (55.73% identity, 71.83% similarity) |
| | | | | | | | | APG00112 - US_2016_0311864_A1-23 (55.49% |
| | | | | | | | | identity, 71.34% similarity) |
| | | | | | | | | Cry64Aa1 (36.56% identity, 51.06% similarity) |
| APG07518 | 241 | 242 | | | Cry34 | 70, 75, 80, 85, 90, 95, | 80, 85, 90, 95, 96, 97, | KDN80650.1 (65.70% identity, 78.49% similarity) |
| | | | | | | 96, 97, 98, 99 | 98, 99 | WP_030263691.1 (52.63% identity, 57.31% |
| | | | | | | | | similarity) |
| | | | | | | | | WP_035875344.1 (48.84% identity, 58.14% |
| | | | | | | | | similarity) |
| | | | | | | | | Cry34Ac2 (23.76% identity, 38.67% similarity) |
| APG07559 | 243 | 244, 245 | | | Cry | 90, 95, 96, 97, 98, 99 | 90, 95, 96, 97, 98, 99 | WP_052899882.1 (88.06% identity, 88.06% |
| | | | | | | | | similarity) |
| | | | | | | | | V6MF71_PROHU (23.63% identity, 37.29% |
| | | | | | | | | similarity) |
| | | | | | | | | B4F0T5_PROMH (23.58% identity, 38.15% |
| | | | | | | | | similarity) |
| | | | | | | | | KGA56885.1 (23.55% identity, 38.29% similarity) |
| APG07655 | 246 | | | | MTX | 80, 85, 90, 95, 96, 97, | 90, 95, 96, 97, 98, 99 | APG00155 - US_2016_0311864_A1-40 (96.62% |
| | | | | | | 98, 99 | | identity, 98.65% similarity) |
| | | | | | | | | APG03379 (81.88% identity, 88.93% similarity) |
| | | | | | | | | APG01506 (81.42% identity, 88.18% similarity) |
| | | | | | | | | APG00749 (81.33% identity, 88.33% similarity) |
| | | | | | | | | APG08241 (79.73% identity, 87.16% similarity) |
| | | | | | | | | APG08589 (79.05% identity, 88.18% similarity) |
| | | | | | | | | APG02638 (78.93% identity, 87.96% similarity) |
| | | | | | | | | APG00201.1 - US_2016_0304898_A1-194 (78.45% |
| | | | | | | | | identity, 86.20% similarity) |
| | | | | | | | | APG00107 - US_2016_0311864_A1-21 (78.38% |
| | | | | | | | | identity, 87.50% similarity) |
| | | | | | | | | J8YPM2_BACCE (78.04% identity, 86.15% |
| | | | | | | | | similarity) |
| | | | | | | | | APG00201 - US_2016_0304898_A1-193 (76.64% |
| | | | | | | | | identity, 84.21% similarity) |
| APG07672 | 247 | 248, 249 | | | MTX | 97, 98, 99 | 99 | OJG59749.1 (96.86% identity, 98.43% similarity) |
| | | | | | | | | WP_062805258.1 (96.54% identity, 96.54% |
| | | | | | | | | similarity) |
| | | | | | | | | R2QDC7_ENTMU (96.23% identity, 96.54% |
| | | | | | | | | similarity) |
| | | | | | | | | V5XPU0_ENTMU (96.23% identity, 96.54% |
| | | | | | | | | similarity) |
| APG07731 | 250 | 251 | | | MTX | 100 | 100 | KFD20795.1 (100.00% identity, 100.00% similarity) |
| | | | | | | | | WP_006820002.1 (98.07% identity, 98.07% |
| | | | | | | | | similarity) |
| | | | | | | | | WP_011306610.1 (46.98% identity, 65.08% |
| | | | | | | | | similarity) |
| | | | | | | | | WP_048178060.1 (46.44% identity, 62.54% |
| | | | | | | | | similarity) |
| APG07748 | 252 | 253, 254 | | | MTX | 85, 90, 95, 96, 97, 98, | 90, 95, 96, 97, 98, 99 | APG00129 - US_2016_0304898_A1-158 (85.35% |
| | | | | | | 99 | | identity, 87.41% similarity) |
| | | | | | | | | APG00129.1 - US_2016_0304898_A1-159 (85.13% |
| | | | | | | | | identity, 87.41% similarity) |
| | | | | | | | | APG06372 (82.61% identity, 86.73% similarity) |
| | | | | | | | | WP_061657790.1 (82.15% identity, 86.27% |
| | | | | | | | | similarity) |
| | | | | | | | | W8YCZ9_BACTU (82.15% identity, 86.04% |
| | | | | | | | | similarity) |
| | | | | | | | | APG00681 (58.28% identity, 71.30% similarity) |
| | | | | | | | | APG03484 (54.89% identity, 68.89% similarity) |
| | | | | | | | | APG00304 (53.20% identity, 65.07% similarity) |
| | | | | | | | | APG00366 (50.68% identity, 64.55% similarity) |
| APG07783 | 255 | 256 | | | MTX | 35, 40, 45, 50, 55, 60, | 45, 50, 55, 60, 65, 70, | WP_036654376.1 (30.62% identity, 44.10% |
| | | | | | | 65, 70, 75, 80, 85, 90, | 75, 80, 85, 90, 95, 96, | similarity) |
| | | | | | | 95, 96, 97, 98, 99 | 97, 98, 99 | W2E623_9BACL (29.55% identity, 42.90% |
| | | | | | | | | similarity) |
| | | | | | | | | A0A015NB99_BACTU (28.53% identity, 41.58% |
| | | | | | | | | similarity) |
| | | | | | | | | CA_2753491-78 (27.45% identity, 43.42% similarity) |
| APG07787 | 257 | | | | Cry | 40, 45, 50, 55, 60, 65, | 55, 60, 65, 70, 75, 80, | WP_025141994.1 (39.55% identity, 54.29% |
| | | | | | | 70, 75, 80, 85, 90, 95, | 85, 90, 95, 96, 97, 98, | similarity) |
| | | | | | | 96, 97, 98, 99 | 99 | SFM63176.1 (32.92% identity, 48.62% similarity) |
| | | | | | | | | C6VUR9_DYAFD (27.26% identity, 37.23% |
| | | | | | | | | similarity) |
| | | | | | | | | WP_015811311.1 (12.60% identity, 17.57% |
| | | | | | | | | similarity) |
| APG07790 | 258 | 259, 260 | | | Vip4 | 55, 60, 65, 70, 75, 80, | 70, 75, 80, 85, 90, 95, | WP_002193627.1 (52.81% identity, 66.95% |
| | | | | | | 85, 90, 95, 96, 97, 98, | 96, 97, 98, 99 | similarity) |
| | | | | | | 99 | | APG09984 (51.82% identity, 65.92% similarity) |
| | | | | | | | | APG00106 - US_2016_0304898_A1-134 (51.50% |
| | | | | | | | | identity, 65.45% similarity) |
| | | | | | | | | APG04931 (51.38% identity, 65.84% similarity) |
| | | | | | | | | US_2013_0227743_A1_130 (50.05% identity, 64.41% |
| | | | | | | | | similarity) |
| | | | | | | | | Vip4Aa1 (49.95% identity, 65.48% similarity) |
| APG07803 | 261 | 262 | | | Cry | 45, 50, 55, 60, 65, 70, | 60, 65, 70, 75, 80, 85, | APG06253 (88.97% identity, 93.37% similarity) |
| | | | | | | 75, 80, 85, 90, 95, 96, | 90, 95, 96, 97, 98, 99 | APG00188 - US_2016_0311864_A1-57 (88.11% |
| | | | | | | 97, 98, 99 | | identity, 92.36% similarity) |
| | | | | | | | | APG00007 - US_2016_0304898_A1-11 (73.01% |
| | | | | | | | | identity, 82.49% similarity) |
| | | | | | | | | APG01780 (72.78% identity, 80.76% similarity) |
| | | | | | | | | APG00007.1 - US_2016_0304898_A1-12 (72.63% |
| | | | | | | | | identity, 81.8% similarity) |
| | | | | | | | | APG01915 (70.57% identity, 80.58% similarity) |
| | | | | | | | | Cry32Ca1 (43.12% identity, 55.74% similarity) |
| APG07818 | 263 | 264 | | | Bin | 25, 30, 35, 40, 45, 50, | 40, 45, 50, 55, 60, 65, | APG00798.1 - US_2016_0311864_A1-381 (95.29% |
| | | | | | | 55, 60, 65, 70, 75, 80, | 70, 75, 80, 85, 90, 95, | identity, 96.77% similarity) |
| | | | | | | 85, 90, 95, 96, 97, 98, | 96, 97, 98, 99 | APG00798 - US_2016_0311864_A1-219 (93.20% |
| | | | | | | 99 | | identity, 94.66% similarity) |
| | | | | | | | | APG00212.1 - US_2016_0311864_A1-259 (91.04% |
| | | | | | | | | identity, 95.52% similarity) |
| | | | | | | | | APG00619 - US_2016_0311864_A1-199 (90.57% |
| | | | | | | | | identity, 94.04% similarity) |
| | | | | | | | | APG00212 - US_2016_0311864_A1-75 (89.05% |
| | | | | | | | | identity, 93.43% similarity) |
| | | | | | | | | APG00600 - US_2016_0311864_A1-197 (86.53% |
| | | | | | | | | identity, 92.77% similarity) |
| | | | | | | | | APG00592 - US_2016_0311864_A1-195 (84.91% |
| | | | | | | | | identity, 90.02% similarity) |
| | | | | | | | | APG04176 (82.38% identity, 89.33% similarity) |
| | | | | | | | | APG05715 (82.34% identity, 89.55% similarity) |
| | | | | | | | | APG02445 (81.33% identity, 88.21% similarity) |
| | | | | | | | | Cry35Ad1 (20.81% identity, 36.24% similarity) |
| APG07857 | 265 | | | | MACPF | 70, 75, 80, 85, 90, 95, | 85, 90, 95, 96, 97, 98, | WP_012145116.1 (69.25% identity, 84.52% |
| | | | | | | 96, 97, 98, 99 | 99 | similarity) |
| | | | | | | | | WP_019961352.1 (33.65% identity, 51.73% |
| | | | | | | | | similarity) |
| | | | | | | | | WP_012039071.1 (32.27% identity, 50.60% |
| | | | | | | | | similarity) |
| | | | | | | | | WP_046018755.1 (29.57% identity, 46.69% |
| | | | | | | | | similarity) |
| APG07860 | 266 | 267 | | | Cry | 40, 45, 50, 55, 60, 65, | 55, 60, 65, 70, 75, 80, | APG00153.1 - US_2016_0311864_A1-244 (84.27% |
| | | | | | | 70, 75, 80, 85, 90, 95, | 85, 90, 95, 96, 97, 98, | identity, 88.86% similarity) |
| | | | | | | 96, 97, 98, 99 | 99 | APG00153 - US_2016_0311864_A1-38 (80.48% |
| | | | | | | | | identity, 84.86% similarity) |
| | | | | | | | | APG00153.2 - US_2016_0311864_A1-245 (75.62% |
| | | | | | | | | identity, 78.37% similarity) |
| | | | | | | | | APG09376 (53.90% identity, 64.62% similarity) |
| | | | | | | | | APG06528 (53.38% identity, 64.62% similarity) |
| | | | | | | | | APG05660 (52.01% identity, 62.53% similarity) |
| | | | | | | | | APG00116 - US_2016_0311864_A1-25 (51.94% |
| | | | | | | | | identity, 62.67% similarity) |
| | | | | | | | | Cry20Ba2 (38.29% identity, 53.03% similarity) |
| APG07866 | 268 | | | | Cry | 45, 50, 55, 60, 65, 70, | 60, 65, 70, 75, 80, 85, | APG07224 (54.17% identity, 63.27% similarity) |
| | | | | | | 75, 80, 85, 90, 95, 96, | 90, 95, 96, 97, 98, 99 | WP_044307385.1 (42.90% identity, 56.31% |
| | | | | | | 97, 98, 99 | | similarity) |
| | | | | | | | | US_2013_0227743_A1-200 (36.27% identity, 49.17% |
| | | | | | | | | similarity) |
| | | | | | | | | APG00401 - US_2016_0311864_A1-168 (33.28% |
| | | | | | | | | identity, 49.63% similarity) |
| | | | | | | | | Cry73Aa (19.46% identity, 30.37% similarity) |
| APG07870 | 269 | 270, 271 | | | Cry32 | 90, 95, 96, 97, 98, 99 | 95, 96, 97, 98, 99 | AGA40054.1 (88.65% identity, 91.49% similarity) |
| | | | | | | | | US_2011_0203014-23 (84.37% identity, 88.97% |
| | | | | | | | | similarity) |
| | | | | | | | | U5KRS1_BACTU (84.29% identity, 88.97% |
| | | | | | | | | similarity) |
| | | | | | | | | APG01329 (82.97% identity, 88.14% similarity) |
| | | | | | | | | APG00710 (80.73% identity, 86.31% similarity) |
| | | | | | | | | APG00058 - US_2016_0311864_A1-3 (79.86% |
| | | | | | | | | identity, 85.78% similarity) |
| | | | | | | | | APG00430 (76.48% identity, 83.00% similarity) |
| | | | | | | | | APG01387 (74.81% identity, 81.03% similarity) |
| | | | | | | | | APG00056 - US_2016_0311864_A1-1 (67.24% |
| | | | | | | | | identity, 77.59% similarity) |
| | | | | | | | | Cry32Da1 (52.77% identity, 64.60% similarity) |
| | | | | | | | | APG00469 (52.72% identity, 64.19% similarity) |
| | | | | | | | | APG03519 (52.64% identity, 64.83% similarity) |
| | | | | | | | | APG05370 (51.28% identity, 62.78% similarity) |
| APG07961 | 272 | | | | Cyt | 45, 50, 55, 60, 65, 70, | 60, 65, 70, 75, 80, 85, | APG00177.1 - US_2016_0311864_A1-248 (89.58% |
| | | | | | | 75, 80, 85, 90, 95, 96, | 90, 95, 96, 97, 98, 99 | identity, 93.33% similarity) |
| | | | | | | 97, 98, 99 | | APG08230 (88.05% identity, 90.84% similarity) |
| | | | | | | | | APG00177 - US_2016_0311864_A1-52 (85.66% |
| | | | | | | | | identity, 89.24% similarity) |
| | | | | | | | | APG00121.1 - US_2016_0311864_A1-238 (83.33% |
| | | | | | | | | identity, 91.67% similarity) |
| | | | | | | | | APG00121 - US_2016_0311864_A1-29 (72.99% |
| | | | | | | | | identity, 80.29% similarity) |
| | | | | | | | | APG04725 (60.58% identity, 78.42% similarity) |
| | | | | | | | | APG00128 - US_2016_0304898_A1-157 (59.35% |
| | | | | | | | | identity, 73.17% similarity) |
| | | | | | | | | APG00126 - US_2016_0304898_A1-153 (57.31% |
| | | | | | | | | identity, 70.36% similarity) |
| | | | | | | | | APG00437 (56.25% identity, 70.31% similarity) |
| | | | | | | | | APG08631 (54.37% identity, 67.3% similarity) |
| | | | | | | | | Cyt2Ca1 (42.75% identity, 57.25% similarity) |
| APG07983 | 273 | | | | MTX | 30, 35, 40, 45, 50, 55, | 45, 50, 55, 60, 65, 70, | APG00598 (28.16% identity, 43.04% similarity) |
| | | | | | | 60, 65, 70, 75, 80, 85, | 75, 80, 85, 90, 95, 96, | APG00236 (27.74% identity, 41.44% similarity) |
| | | | | | | 90, 95, 96, 97, 98, 99 | 97, 98, 99 | APG09455 (27.05% identity, 43.47% similarity) |
| | | | | | | | | APG01996 (26.40% identity, 41.25% similarity) |
| | | | | | | | | US_2015_0047076_A1-6 (26.33% identity, 41.67% |
| | | | | | | | | similarity) |
| APG08039 | 274 | 275 | | | MTX | 90, 95, 96, 97, 98, 99 | 95, 96, 97, 98, 99 | WP_034120444.1 (86.35% identity, 90.59% |
| | | | | | | | | similarity) |
| | | | | | | | | WP_032896431.1 (66.67% identity, 74.65% |
| | | | | | | | | similarity) |
| | | | | | | | | WP_057721649.1 (48.60% identity, 65.89% |
| | | | | | | | | similarity) |
| | | | | | | | | WP_065936110.1 (48.60% identity, 64.25% |
| | | | | | | | | similarity) |
| APG08065 | 276 | 277 | | | Cry32 | 35, 40, 45, 50, 55, 60, | 45, 50, 55, 60, 65, 70, | J8N566_BACCE (33.11% identity, 41.66% similarity) |
| | | | | | | 65, 70, 75, 80, 85, 90, | 75, 80, 85, 90, 95, 96, | AGA40055.1 (32.63% identity, 40.90% similarity) |
| | | | | | | 95, 96, 97, 98, 99 | 97, 98, 99 | AGP18045.1 (29.58% identity, 36.61% similarity) |
| | | | | | | | | Cry32Ea1 (28.75% identity, 35.85% similarity) |
| APG08088 | 278 | 279 | | | MTX | 85, 90, 95, 96, 97, 98, | 90, 95, 96, 97, 98, 99 | APG00006.2 - US_2016_0304898_A1-228 (95.02% |
| | | | | | | 99 | | identity, 96.01% similarity) |
| | | | | | | | | APG00006 - US_2016_0304898_A1-9 (94.43% |
| | | | | | | | | identity, 95.41% similarity) |
| | | | | | | | | APG00006.1 - US_2016_0304898_A1-10 (91.03% |
| | | | | | | | | identity, 91.69% similarity) |
| | | | | | | | | APG02279 (81.64% identity, 87.54% similarity) |
| | | | | | | | | APG00036 - US_2016_0304898_A1-60 (81.27% |
| | | | | | | | | identity, 87.96% similarity) |
| | | | | | | | | APG00749 (80.07% identity, 88.37% similarity) |
| | | | | | | | | J8YPM2_BACCE (80.00% identity, 87.33% |
| | | | | | | | | similarity) |
| | | | | | | | | APG04720 (79.93% identity, 86.96% similarity) |
| | | | | | | | | APG03379 (79.40% identity, 88.70% similarity) |
| | | | | | | | | APG00201 - US_2016_0304898_A1-193 (78.62% |
| | | | | | | | | identity, 87.50% similarity) |
| | | | | | | | | APG02638 (77.81% identity, 87.42% similarity) |
| | | | | | | | | APG09682 (77.67% identity, 88.00% similarity) |
| APG08108 | 280 | | | | MTX | 60, 65, 70, 75, 80, 85, | 80, 85, 90, 95, 96, 97, | APG01037 (89.37% identity, 91.34% similarity) |
| | | | | | | 90, 95, 96, 97, 98, 99 | 98, 99 | APG00623 (88.14% identity, 91.30% similarity) |
| | | | | | | | | APG00556 (80.29% identity, 83.94% similarity) |
| | | | | | | | | CA_2905444-2 (58.08% identity, 75.77% similarity) |
| | | | | | | | | WP_063896378.1 (54.55% identity, 71.15% |
| | | | | | | | | similarity) |
| | | | | | | | | WP_069512762.1 (52.61% identity, 68.28% |
| | | | | | | | | similarity) |
| | | | | | | | | Cry46Ab (33.66% identity, 50.33% similarity) |
| APG08139 | 281 | | | | Cyt | 100 | 100 | WP_043159001.1 (100.00% identity, 100.00% |
| | | | | | | | | similarity) |
| | | | | | | | | APG00462 - US_2016_0311864_A1-183 (84.92% |
| | | | | | | | | identity, 92.86% similarity) |
| | | | | | | | | WP_017413134.1 (80.24% identity, 86.56% |
| | | | | | | | | similarity) |
| | | | | | | | | Cyt1Aa6 (34.05% identity, 47.67% similarity) |
| APG08174 | 282 | 283, 284 | | | Cry | 40, 45, 50, 55, 60, 65, | 55, 60, 65, 70, 75, 80, | APG09573 (90.92% identity, 94.29% similarity) |
| | | | | | | 70, 75, 80, 85, 90, 95, | 85, 90, 95, 96, 97, 98, | AGP18058.1 (38.69% identity, 51.96% similarity) |
| | | | | | | 96, 97, 98, 99 | 99 | J8N566_BACCE (38.66% identity, 53.62% similarity) |
| | | | | | | | | AGP18037.1 (38.17% identity, 52.91% similarity) |
| | | | | | | | | Cry32Ab1 (34.16% identity, 50.94% similarity) |
| APG08230 | 285 | 286 | | | Cyt | 45, 50, 55, 60, 65, 70, | 60, 65, 70, 75, 80, 85, | APG00177 - US_2016_0311864_A1-52 (95.60% |
| | | | | | | 75, 80, 85, 90, 95, 96, | 90, 95, 96, 97, 98, 99 | identity, 98.00% similarity) |
| | | | | | | 97, 98, 99 | | APG00177.1 - US_2016_0311864_A1-248 (92.40% |
| | | | | | | | | identity, 94.00% similarity) |
| | | | | | | | | APG07961 (88.05% identity, 90.84% similarity) |
| | | | | | | | | APG00177.2 - US_2016_0311864_A1-53 (85.20% |
| | | | | | | | | identity, 87.60% similarity) |
| | | | | | | | | APG00121 - US_2016_0311864_A1-29 (69.34% |
| | | | | | | | | identity, 79.56% similarity) |
| | | | | | | | | APG04725 (57.14% identity, 75.79% similarity) |
| | | | | | | | | APG00126 - US_2016_0304898_A1-153 (56.18% |
| | | | | | | | | identity, 74.10% similarity) |
| | | | | | | | | APG00128 - US_2016_0304898_A1-157 (55.86% |
| | | | | | | | | identity, 69.53% similarity) |
| | | | | | | | | APG00437 (54.41% identity, 71.26% similarity) |
| | | | | | | | | APG08631 (52.81% identity, 68.91% similarity) |
| | | | | | | | | Cyt2Aa2 (41.45% identity, 59.64% similarity) |
| APG08278 | 287 | 288, 289 | | | MTX | 80, 85, 90, 95, 96, 97, | 90, 95, 96, 97, 98, 99 | APG00268 (92.82% identity, 96.28% similarity) |
| | | | | | | 98, 99 | | APG00393 (90.96% identity, 95.48% similarity) |
| | | | | | | | | APG00764 (90.69% identity, 94.95% similarity) |
| | | | | | | | | APG00322 (90.16% identity, 94.15% similarity) |
| | | | | | | | | APG00481 (89.92% identity, 94.43% similarity) |
| | | | | | | | | APG00635 - US_2016_0311864_A1-201 (88.30% |
| | | | | | | | | identity, 92.29% similarity) |
| | | | | | | | | APG00635.1 - US_2016_0311864_A1-369 (85.37% |
| | | | | | | | | identity, 88.56% similarity) |
| | | | | | | | | APG00020 - US_2016_0304898_A1-33 (81.91% |
| | | | | | | | | identity, 89.10% similarity) |
| | | | | | | | | APG01231 (78.80% identity, 84.29% similarity) |
| | | | | | | | | WP_071770709.1 (78.48% identity, 85.30% |
| | | | | | | | | similarity) |
| APG08307 | 290 | 291 | | | MTX | 30, 35, 40, 45, 50, 55, | 40, 45, 50, 55, 60, 65, | APG04807 (51.20% identity, 65.87% similarity) |
| | | | | | | 60, 65, 70, 75, 80, 85, | 70, 75, 80, 85, 90, 95, | US_2013_0227743_A1-114 (25.48% identity, 36.30% |
| | | | | | | 90, 95, 96, 97, 98, 99 | 96, 97, 98, 99 | similarity) |
| | | | | | | | | AGP17988.1 (14.31% identity, 22.86% similarity) |
| APG08350 | 292 | 293 | | | Cry41 | 75, 80, 85, 90, 95, 96, | 85, 90, 95, 96, 97, 98, | WP_001070417.1 (70.95% identity, 80.09% |
| | | | | | | 97, 98, 99 | 99 | similarity) |
| | | | | | | | | Cry41Ba2 (68.95% identity, 77.84% similarity) |
| APG08396 | 294 | 295, 296 | | | Cry | 30, 35, 40, 45, 50, 55, | 45, 50, 55, 60, 65, 70, | APG00189 - US_2016_0311864_A1-59 (97.77% |
| | | | | | | 60, 65, 70, 75, 80, 85, | 75, 80, 85, 90, 95, 96, | identity, 98.09% similarity) |
| | | | | | | 90, 95, 96, 97, 98, 99 | 97, 98, 99 | APG00189.1 - US_2016_0311864_A1-60 (96.33% |
| | | | | | | | | identity, 96.65% similarity) |
| | | | | | | | | APG00189.2 - US_2016_0311864_A1-61 (96.01% |
| | | | | | | | | identity, 96.33% similarity) |
| | | | | | | | | APG00087 - US_2016_0177333_A1-47 (89.51% |
| | | | | | | | | identity, 93.16% similarity) |
| | | | | | | | | Cry1Ib4 (27.00% identity, 40.05% similarity) |
| APG08461 | 297 | | | | Cyt | 30, 35, 40, 45, 50, 55, | 50, 55, 60, 65, 70, 75, | SFX65039.1 (26.45% identity, 46.69% similarity) |
| | | | | | | 60, 65, 70, 75, 80, 85, | 80, 85, 90, 95, 96, 97, | SFX65069.1 (25.58% identity, 43.80% similarity) |
| | | | | | | 90, 95, 96, 97, 98, 99 | 98, 99 | SFX65053.1 (22.87% identity, 43.02% similarity) |
| APG08525 | 298 | 299 | | | MTX | 35, 40, 45, 50, 55, 60, | 55, 60, 65, 70, 75, 80, | APG04793 (85.39% identity, 92.51% similarity) |
| | | | | | | 65, 70, 75, 80, 85, 90, | 85, 90, 95, 96, 97, 98, | APG03686 (83.90% identity, 92.51% similarity) |
| | | | | | | 95, 96, 97, 98, 99 | 99 | APG07676 (83.52% identity, 92.51% similarity) |
| | | | | | | | | APG03747 (83.15% identity, 92.13% similarity) |
| | | | | | | | | APG00014 - US_2016_0304898_A1-24 (50.74% |
| | | | | | | | | identity, 67.41% similarity) |
| | | | | | | | | US_2012_0278954_A1-22 (34.42% identity, 50.36% |
| | | | | | | | | similarity) |
| | | | | | | | | WP_033694890.1 (34.07% identity, 45.71% |
| | | | | | | | | similarity) |
| | | | | | | | | AF316145 (31.25% identity, 48.96% similarity) |
| APG08589 | 300 | | | | MTX | 80, 85, 90, 95, 96, 97, | 90, 95, 96, 97, 98, 99 | APG00930 - US_2016_0311864_A1-397 (87.16% |
| | | | | | | 98, 99 | | identity, 92.91% similarity) |
| | | | | | | | | APG00107 - US_2016_0311864_A1-21 (86.82% |
| | | | | | | | | identity, 93.24% similarity) |
| | | | | | | | | APG01245 - US_2016_0311864_A1-398 (86.49% |
| | | | | | | | | identity, 93.92% similarity) |
| | | | | | | | | APG08241 (83.45% identity, 92.23% similarity) |
| | | | | | | | | APG01506 (80.41% identity, 90.20% similarity) |
| | | | | | | | | APG07655 (79.05% identity, 88.18% similarity) |
| | | | | | | | | J8YPM2_BACCE (78.72% identity, 89.19% |
| | | | | | | | | similarity) |
| | | | | | | | | APG03379 (76.85% identity, 86.58% similarity) |
| | | | | | | | | APG09682 (76.77% identity, 87.88% similarity) |
| | | | | | | | | APG00847 - US_2016_0304898_A1-223 (76.32% |
| | | | | | | | | identity, 85.53% similarity) |
| APG08631 | 301 | 302 | | | Cyt | 90, 95, 96, 97, 98, 99 | 95, 96, 97, 98, 99 | APG00126 - US_2016_0304898_A1-153 (92.80% |
| | | | | | | | | identity, 93.20% similarity) |
| | | | | | | | | APG00437 (91.20% identity, 94.00% similarity) |
| | | | | | | | | APG00126.1 - US_2016_0304898_A1-154 (90.40% |
| | | | | | | | | identity, 90.80% similarity) |
| | | | | | | | | WP_016110460.1 (88.00% identity, 91.20% |
| | | | | | | | | similarity) |
| | | | | | | | | APG04725 (75.60% identity, 85.20% similarity) |
| | | | | | | | | APG00121 - US_2016_0311864_A1-29 (55.40% |
| | | | | | | | | identity, 68.71% similarity) |
| | | | | | | | | APG07961 (54.37% identity, 67.30% similarity) |
| | | | | | | | | APG00177 - US_2016_0311864_A1-52 (53.18% |
| | | | | | | | | identity, 69.29% similarity) |
| | | | | | | | | APG08230 (52.81% identity, 68.91% similarity) |
| | | | | | | | | APG00128 - US_2016_0304898_A1-157 (52.69% |
| | | | | | | | | identity, 67.69% similarity) |
| | | | | | | | | Cyt2Ca1 (37.83% identity, 52.43% similarity) |
| APG08657 | 303 | 304 | | | Cry69 | 80, 85, 90, 95, 96, 97, | 85, 90, 95, 96, 97, 98, 99 | K0G0L7_BACTU (77.37% identity, 84.36% |
| | | | | | | 98, 99 | | similarity) |
| | | | | | | | | WP_001075209.1 (76.92% identity, 83.90% |
| | | | | | | | | similarity) |
| | | | | | | | | Cry69Aa1 (74.11% identity, 81.02% similarity) |
| | | | | | | | | APG00786 (65.49% identity, 76.17% similarity) |
| | | | | | | | | APG02067 (63.83% identity, 74.05% similarity) |
| | | | | | | | | APG00662 (63.47% identity, 73.66% similarity) |
| | | | | | | | | APG00079 - US_2016_0177333_A1-43 (59.64% |
| | | | | | | | | identity, 71.19% similarity) |
| | | | | | | | | APG00059 - US_2016_0177333_A1-27 (57.87% |
| | | | | | | | | identity, 69.72% similarity) |
| APG08665 | 305 | 306, 307 | | | Cry | 40, 45, 50, 55, 60, 65, | 55, 60, 65, 70, 75, 80, | US_2013_0227743_A1-192 (36.69% identity, 50.63% |
| | | | | | | 70, 75, 80, 85, 90, 95, | 85, 90, 95, 96, 97, 98, | similarity) |
| | | | | | | 96, 97, 98, 99 | 99 | AGA40064.1 (26.23% identity, 41.90% similarity) |
| | | | | | | | | US_8461421_B2-100 (24.01% identity, 37.94% |
| | | | | | | | | similarity) |
| | | | | | | | | Cry70Ba1 (22.87% identity, 39.20% similarity) |
| APG08693 | 308 | 309 | | | MTX | 45, 50, 55, 60, 65, 70, | 55, 60, 65, 70, 75, 80, | AGA40042.1 (43.09% identity, 53.59% similarity) |
| | | | | | | 75, 80, 85, 90, 95, 96, | 85, 90, 95, 96, 97, 98, | AGA40043.1 (39.17% identity, 51.39% similarity) |
| | | | | | | 97, 98, 99 | 99 | US_8829279_B2-11 (31.25% identity, 45.65% |
| | | | | | | | | similarity) |
| | | | | | | | | SDZ23421.1 (29.60% identity, 43.68% similarity) |
| APG08817 | 310 | 311, 312 | | | MTX | 60, 65, 70, 75, 80, 85, | 70, 75, 80, 85, 90, 95, | AGP18007.1 (56.62% identity, 69.61% similarity) |
| | | | | | | 90, 95, 96, 97, 98, 99 | 96, 97, 98, 99 | SDW56810.1 (35.75% identity, 51.81% similarity) |
| | | | | | | | | SDW71198.1 (32.79% identity, 51.49% similarity) |
| | | | | | | | | Cry55Aa1 (19.47% identity, 36.54% similarity) |
| APG08898 | 313 | 314 | | | MTX | 35, 40, 45, 50, 55, 60, | 50, 55, 60, 65, 70, 75, | AGC39300.1 (34.04% identity, 48.46% similarity) |
| | | | | | | 65, 70, 75, 80, 85, 90, | 80, 85, 90, 95, 96, 97, | WP_043924590.1 (32.62% identity, 46.10% |
| | | | | | | 95, 96, 97, 98, 99 | 98, 99 | similarity) |
| | | | | | | | | AGP17979.1 (31.54% identity, 46.94% similarity) |
| | | | | | | | | Cry55Aa1 (20.80% identity, 37.35% similarity) |
| APG08919 | 315 | 316 | | | MTX | 45, 50, 55, 60, 65, 70, | 55, 60, 65, 70, 75, 80, | EJL23000.1 (41.14% identity, 54.27% similarity) |
| | | | | | | 75, 80, 85, 90, 95, 96, | 85, 90, 95, 96, 97, 98, | WP_035088343.1 (35.12% identity, 50.00% |
| | | | | | | 97, 98, 99 | 99 | similarity) |
| | | | | | | | | WP_035074455.1 (34.77% identity, 49.59% |
| | | | | | | | | similarity) |
| | | | | | | | | ABK64066.1 (29.31% identity, 43.87% similarity) |
| APG08931 | 317 | 318 | | | Cry | 90, 95, 96, 97, 98, 99 | 95, 96, 97, 98, 99 | APG00206 - US_2016_0304898_A1-199 (95.58% |
| | | | | | | | | identity, 97.63% similarity) |
| | | | | | | | | WP_048536348.1 (85.83% identity, 91.99% |
| | | | | | | | | similarity) |
| | | | | | | | | APG00206.1 - US_2016_0304898_A1-200 (66.43% |
| | | | | | | | | identity, 67.66% similarity) |
| | | | | | | | | Cry70Ba1 (19.49% identity, 31.19% similarity) |
| APG09084 | 319 | | | | MTX | 50, 55, 60, 65, 70, 75, | 65, 70, 75, 80, 85, 90, | AGA40062.1 (47.81% identity, 62.19% similarity) |
| | | | | | | 80, 85, 90, 95, 96, 97, | 95, 96, 97, 98, 99 | AGA40061.1 (42.24% identity, 56.03% similarity) |
| | | | | | | 98, 99 | | Cry64Aa1 (32.54% identity, 47.46% similarity) |
| APG09232 | 320 | 321 | | | MTX | 35, 40, 45, 50, 55, 60, | 55, 60, 65, 70, 75, 80, | APG02168 (76.88% identity, 85.84% similarity) |
| | | | | | | 65, 70, 75, 80, 85, 90, | 85, 90, 95, 96, 97, 98, | WP_065845806.1 (34.49% identity, 49.57% |
| | | | | | | 95, 96, 97, 98, 99 | 99 | similarity) |
| | | | | | | | | SDW46809.1 (30.70% identity, 50.42% similarity) |
| | | | | | | | | SDX17518.1 (28.02% identity, 45.33% similarity) |
| | | | | | | | | WP_006918908.1 (23.38% identity, 42.25% |
| | | | | | | | | similarity) |
| APG09234 | 322 | | 323 | | VIP/MTX | 20, 25, 30, 35, 40, 45, | 35, 40, 45, 50, 55, 60, | WP_069716196.1 (18.74% identity, 30.87% |
| | | | | | | 50, 55, 60, 65, 70, 75, | 65, 70, 75, 80, 85, 90, | similarity) |
| | | | | | | 80, 85, 90, 95, 96, 97, | 95, 96, 97, 98, 99 | WP_069716192 1 (17 69% identity 29 29% |
| | | | | | | 98, 99 | | similarity) |
| | | | | | | | | WP_068123920.1 (17.57% identity, 28.86% |
| | | | | | | | | similarity) |
| | | | | | | | | Vip1Aa3 (15.02% identity, 23.67% similarity) |
| APG09296 | 324 | 325 | | | Vip3 | 20, 25, 30, 35, 40, 45, | 30, 35, 40, 45, 50, 55, | APG00074 - US_2016_0311864_A1-14 (56.98% |
| | | | | | | 50, 55, 60, 65, 70, 75, | 60, 65, 70, 75, 80, 85, | identity, 59.28% similarity) |
| | | | | | | 80, 85, 90, 95, 96, 97, | 90, 95, 96, 97, 98, 99 | APG000741 - US_2016_0311864_A1-228 (56.32% |
| | | | | | | 98, 99 | | identity, 58.62% similarity) |
| | | | | | | | | APG00077 - US_2016_0304898_A1-99 (27.62% |
| | | | | | | | | identity, 33.58% similarity) |
| | | | | | | | | Vip3Bb3 (16.26% identity, 26.21% similarity) |
| APG09413 | 326 | | | | MTX | 25, 30, 35, 40, 45, 50, | 30, 35, 40, 45, 50, 55, | AGA40042.1 (20.29% identity, 29.12% similarity) |
| | | | | | | 55, 60, 65, 70, 75, 80, | 60, 65, 70, 75, 80, 85, | AGA40043.1 (20.29% identity, 28.82% similarity) |
| | | | | | | 85, 90, 95, 96, 97, 98, | 90, 95, 96, 97, 98, 99 | J7XTF7_BACCE (16.29% identity, 27.80% similarity) |
| | | | | | | 99 | | WP_065486138.1 (15.92% identity, 24.58% |
| | | | | | | | | similarity) |
| APG09484 | 327 | 328 | | | MTX | 95, 96, 97, 98, 99 | 96, 97, 98, 99 | WP_069927276.1 (91.95% identity, 95.21% |
| | | | | | | | | similarity) |
| | | | | | | | | WP_069932919.1 (91.08% identity, 94.31% |
| | | | | | | | | similarity) |
| | | | | | | | | WP_030570374.1 (79.50% identity, 82.57% |
| | | | | | | | | similarity) |
| | | | | | | | | WP_058043677.1 (72.78% identity, 83.36% |
| | | | | | | | | similarity) |
| APG09543 | 329 | 330 | | | Cry | 40, 45, 50, 55, 60, 65, | 55, 60, 65, 70, 75, 80, | US_2013_0227743_A1-152 (36.69% identity, 52.22% |
| | | | | | | 70, 75, 80, 85, 90, 95, | 85, 90, 95, 96, 97, 98, | similarity) |
| | | | | | | 96, 97, 98, 99 | 99 | WP_048536363.1 (27.09% identity, 41.74% |
| | | | | | | | | similarity) |
| | | | | | | | | US_2013_0227743_A1-202 (26.79% identity, 42.26% |
| | | | | | | | | similarity) |
| | | | | | | | | Cry3Ca1 (14.58% identity, 22.89% similarity) |
| APG09545 | 331 | 332 | | | Vip4 | 90, 95, 96, 97, 98, 99 | 95, 96, 97, 98, 99 | SCC38903.1 (87.01% identity, 92.21% similarity) |
| | | | | | | | | WP_048561796.1 (75.05% identity, 84.69% |
| | | | | | | | | similarity) |
| | | | | | | | | SCL96146.1 (74.95% identity, 84.29% similarity) |
| | | | | | | | | APG04931 (59.26% identity, 70.37% similarity) |
| | | | | | | | | Vip4Aa1 (53.92% identity, 69.8% similarity) |
| APG09573 | 333 | 334, 335 | | | Cry32 | 40, 45, 50, 55, 60, 65, | 55, 60, 65, 70, 75, 80, | APG08174 (90.92% identity, 94.29% similarity) |
| | | | | | | 70, 75, 80, 85, 90, 95, | 85, 90, 95, 96, 97, 98, | AGP18058.1 (38.12% identity, 51.48% similarity) |
| | | | | | | 96, 97, 98, 99 | 99 | WP_029439076.1 (38.11% identity, 54.27% |
| | | | | | | | | similarity) |
| | | | | | | | | J8N566_BACCE (37.35% identity, 51.66% similarity) |
| | | | | | | | | Cry32Aa1 (34.45% identity, 50.41% similarity) |
| APG09589 | 336 | | | | Bin | 65, 70, 75, 80, 85, 90, | 80, 85, 90, 95, 96, 97, | ELQ83808.1 (64.01% identity, 75.16% similarity) |
| | | | | | | 95, 96, 97, 98, 99 | 98, 99 | KOT92468.1 (64.01% identity, 75.16% similarity) |
| | | | | | | | | WP_030594506.1 (63.69% identity, 75.48% |
| | | | | | | | | similarity) |
| | | | | | | | | Cry34Ab1 (14.89% identity, 21.68% similarity) |
| APG09630 | 337 | 338 | | | Cry | 50, 55, 60, 65, 70, 75, | 60, 65, 70, 75, 80, 85, | APG00723 - US_2016_0311864_A1-209 (92.11% |
| | | | | | | 80, 85, 90, 95, 96, 97, | 90, 95, 96, 97, 98, 99 | identity, 94.27% similarity) |
| | | | | | | 98, 99 | | APG00723.1 - US_2016_0311864_A1-375 (86.53% |
| | | | | | | | | identity, 88.54% similarity) |
| | | | | | | | | WP_061139970.1 (46.97% identity, 56.56% |
| | | | | | | | | similarity) |
| | | | | | | | | APG00232 - US_2016_0311864_A1-87 (36.06% |
| | | | | | | | | identity, 46.76% similarity) |
| APG09682 | 339 | | | | MTX | 80, 85, 90, 95, 96, 97, | 90, 95, 96, 97, 98, 99 | APG00201.1 - US_2016_0304898_A1-194 (83.84% |
| | | | | | | 98, 99 | | identity, 89.90% similarity) |
| | | | | | | | | APG00201 - US_2016_0304898_A1-193 (81.91% |
| | | | | | | | | identity, 87.83% similarity) |
| | | | | | | | | APG00847 - US_2016_0304898_A1-223 (81.58% |
| | | | | | | | | identity, 87.83% similarity) |
| | | | | | | | | APG03379 (81.54% identity, 88.26% similarity) |
| | | | | | | | | APG00749 (79.93% identity, 85.86% similarity) |
| | | | | | | | | APG07655 (79.19% identity, 86.91% similarity) |
| | | | | | | | | APG02279 (78.76% identity, 87.58% similarity) |
| | | | | | | | | J8YPM2_BACCE (78.45% identity, 89.23% |
| | | | | | | | | similarity) |
| | | | | | | | | APG08088 (77.67% identity, 88.00% similarity) |
| | | | | | | | | APG00006 - US_2016_0304898_A1-9 (77.45% |
| | | | | | | | | identity, 87.25% similarity) |
| | | | | | | | | APG08589 (76.77% identity, 87.88% similarity) |
| APG09864 | 340 | 341 | | | MTX | 25, 30, 35, 40, 45, 50, | 40, 45, 50, 55, 60, 65, | APG04807 (31.78% identity, 49.07% similarity) |
| | | | | | | 55, 60, 65, 70, 75, 80, | 70, 75, 80, 85, 90, 95, | APG07058 (30.31% identity, 46.46% similarity) |
| | | | | | | 85, 90, 95, 96, 97, 98, | 96, 97, 98, 99 | APG00940 (28.61% identity, 46.81% similarity) |
| | | | | | | 99 | | APG08307 (26.61% identity, 45.87% similarity) |
| | | | | | | | | APG01044 (25.18% identity, 39.43% similarity) |
| | | | | | | | | APG00156 (24.09% identity, 37.42% similarity) |
| | | | | | | | | APG02531 (22.97% identity, 36.43% similarity) |
| | | | | | | | | US_2013_0227743_A1-114 (22.85% identity, 38.46% |
| | | | | | | | | similarity) |
| APG09877 | 342 | | | | Cry44 | 60, 65, 70, 75, 80, 85, | 70, 75, 80, 85, 90, 95, | Cry44Aa (55.40% identity, 69.49% similarity) |
| | | | | | | 90, 95, 96, 97, 98, 99 | 96, 97, 98, 99 | |
| APG09936 | 343 | 344 | | | Cry | 95, 96, 97, 98, 99 | 97, 98, 99 | WP_049738340.1 (94.64% identity, 96.50% |
| | | | | | | | | similarity) |
| | | | | | | | | APG05978 (93.61% identity, 94.52% similarity) |
| | | | | | | | | SEE67477.1 (36.79% identity, 58.24% similarity) |
| | | | | | | | | WP_036155538.1 (31.08% identity, 50.53% |
| | | | | | | | | similarity) |
| | | | | | | | | Cry19Ba1 (15.76% identity, 25.82% similarity) |
| APG09947 | 345 | 346 | | | Cry | 30, 35, 40, 45, 50, 55, | 45, 50, 55, 60, 65, 70, | AGA40057.1 (26.26% identity, 40.36% similarity) |
| | | | | | | 60, 65, 70, 75, 80, 85, | 75, 80, 85, 90, 95, 96, | AGA40058.1 (25.86% identity, 42.59% similarity) |
| | | | | | | 90, 95, 96, 97, 98, 99 | 97, 98, 99 | US20130227743A1_202 (25.07% identity, 40.36% |
| | | | | | | | | similarity) |
| | | | | | | | | WP_048536362.1 (24.66% identity, 37.14% |
| | | | | | | | | similarity) |
| APG09984 | 347 | | | | Vip4 | 70, 75, 80, 85, 90, 95, | 80, 85, 90, 95, 96, 97, | APG00106 - US_2016_0304898_A1-134 (73.45% |
| | | | | | | 96, 97, 98, 99 | 98, 99 | identity, 82.55% similarity) |
| | | | | | | | | WP_002193627.1 (69.93% identity, 79.07% |
| | | | | | | | | similarity) |
| | | | | | | | | SCC34829.1 (67.35% identity, 76.31% similarity) |
| | | | | | | | | APG04931 (55.58% identity, 69.35% similarity) |
| | | | | | | | | Vip4Aa1 (51.91% identity, 66.97% similarity) |
| | | | | | | | | APG07790 (51.82% identity, 65.92% similarity) |
| APG00905.0 | 348 | 349 | | | Bin | 91, 92, 93, 94, 95, 96, | 94, 95, 96, 97, 98, 99, | APG07818.0 (92.31% identity, 95.04% similarity) |
| | | | | | | 97, 98, 99, 100 | 100 | APG00619.0 US_2016_0311864_A1-199 (90.82% |
| | | | | | | | | identity, 93.8% similarity) |
| | | | | | | | | APG00798.0 US_2016_0311864_A1-219 (89.81% |
| | | | | | | | | identity, 93.45% similarity) |
| | | | | | | | | APG00212.0 US_2016_0311864_A1-75 (84.71% |
| | | | | | | | | identity, 91.26% similarity) |
| | | | | | | | | APG00306.0 US_2016_0366881_A1-3 (83.37% |
| | | | | | | | | identity, 90.57% similarity) |
| | | | | | | | | APG00592.0 US_2016_0311864_A1-195 (83.25% |
| | | | | | | | | identity, 88.35% similarity) |
| | | | | | | | | APG00600.0 US_2016_0311864_A1-197 (82.38% |
| | | | | | | | | identity, 89.58% similarity) |
| | | | | | | | | APG04176.0 (82.18% identity, 89.6% similarity) |
| | | | | | | | | WP_070144216.1 (81.68% identity, 88.86% |
| | | | | | | | | similarity) |
| | | | | | | | | APG05715.0 (81.17% identity, 88.26% similarity) |
| | | | | | | | | APG00806.0 (80.69% identity, 87.62% similarity) |
| | | | | | | | | APG02445.0 (80.2% identity, 87.53% similarity) |
| APG02585.0 | 350 | 351 | | | Vip4 | 55, 60, 65, 70, 75, 80, | 70, 75, 80, 85, 90, 91, | APG01474.0 (96.62% identity, 98.05% similarity) |
| | | | | | | 85, 90, 91, 92, 93, 94, | 92, 93, 94, 95, 96, 97, | CA_2844913-129 (52.92% identity, 68.25% |
| | | | | | | 95, 96, 97, 98, 99, 100 | 98, 99, 100 | similarity) |
| | | | | | | | | CA_2844913-130 (52.92% identity, 68.25% |
| | | | | | | | | similarity) |
| | | | | | | | | WP_016123960.1 (52.79% identity, 66.87% |
| | | | | | | | | similarity) |
| | | | | | | | | AGT29561.1 (50.45% identity, 67.77% similarity) |
| | | | | | | | | US_2016_0339078_A1-29674 (48.9% identity, |
| | | | | | | | | 68.53% similarity) |
| | | | | | | | | APG04931.0 (48.85% identity, 66.3% similarity) |
| | | | | | | | | SCC34829.1 (48.74% identity, 65.39% similarity) |
| | | | | | | | | APG09984.0 (48.64% identity, 64.82% similarity) |
| | | | | | | | | APG00106.0 US_2016_0304898_A1-134 (47.73% |
| | | | | | | | | identity, 65.09% similarity) |
| | | | | | | | | APG07790.0 (47.56% identity, 61.64% similarity) |
| | | | | | | | | APG07577.0 (47.34% identity, 61.7% similarity) |
| | | | | | | | | US_2016_0339078_A1-28464 (46.76% identity, |
| | | | | | | | | 62.77% similarity) |
| | | | | | | | | WP_048561796.1 (46.37% identity, 63.99% |
| | | | | | | | | similarity) |
| | | | | | | | | WP_053512697.1 (46.18% identity, 63.89% |
| | | | | | | | | similarity) |
| | | | | | | | | SCL96146.1 (46.08% identity, 63.79% similarity) |
| | | | | | | | | SCC38903.1 (45.2% identity, 62.35% similarity) |
| APG03000.0 | 352 | | | | Cry | 98, 99, 100 | 99, 100 | APG00189.0 US_2016_0311864_A1-59 (97.29% |
| | | | | | | | | identity, 98.25% similarity) |
| | | | | | | | | APG08396.0 (96.33% identity, 97.61% similarity) |
| | | | | | | | | APG00087.0 US_2016_0177333_A1-47 (89.51% |
| | | | | | | | | identity, 93.64% similarity) |
| | | | | | | | | APG00179.0 US_2016_0304898_A1-186 (35.11% |
| | | | | | | | | identity, 53.24% similarity) |
| | | | | | | | | US_2016_0017363_A1-27 (35.11% identity, 53.24% |
| | | | | | | | | similarity) |
| | | | | | | | | US_2016_0017363_A1-28 (33.78% identity, 49.18% |
| | | | | | | | | similarity) |
| | | | | | | | | US_2016_0017363_A1-29 (33.63% identity, 49.03% |
| | | | | | | | | similarity) |
| | | | | | | | | US_2016_0017363_A1-30 (33.48% identity, 48.88% |
| | | | | | | | | similarity) |
| | | | | | | | | US_2016_0017363_A1-31 (33.03% identity, 48.13% |
| | | | | | | | | similarity) |
| | | | | | | | | APG06630.0 (30.19% identity, 47.35% similarity) |
| APG03995.0 | 353 | 354 | | | MTX | 95, 96, 97, 98, 99, 100 | 98, 99, 100 | APG00268.0 US_2016_0355842_A1-45 (94.68% |
| | | | | | | | | identity, 97.34% similarity) |
| | | | | | | | | APG00646.0 US_2016_0355842_A1-201 (94.68% |
| | | | | | | | | identity, 97.34% similarity) |
| | | | | | | | | APG00481.0 US_2016_0355842_A1-103 (92.57% |
| | | | | | | | | identity, 95.49% similarity) |
| | | | | | | | | APG08278.0 (91.22% identity, 95.21% similarity) |
| | | | | | | | | APG00322.0 US_2016_0355842_A1-59 (90.43% |
| | | | | | | | | identity, 93.35% similarity) |
| | | | | | | | | APG00393.0 US_2016_0355842_A1-76 (89.1% |
| | | | | | | | | identity, 93.35% similarity) |
| | | | | | | | | APG00764.0 US_2016_0355842_A1-168 (88.83% |
| | | | | | | | | identity, 93.09% similarity) |
| | | | | | | | | APG00959.0 US_2016_0355842_A1-194 (87.5% |
| | | | | | | | | identity, 92.02% similarity) |
| | | | | | | | | APG00635.0 US_2016_0311864_A1-201 (85.9% |
| | | | | | | | | identity, 90.16% similarity) |
| | | | | | | | | APG00597.0 US_2016_0355842_A1-139 (85.49% |
| | | | | | | | | identity, 90.5% similarity) |
| APG04196.0 | 355 | 356 | | | MTX | 40, 45, 50, 55, 60, 65, | 60, 65, 70, 75, 80, 85, | APG06784.0 (93.96% identity, 96.68% similarity) |
| | | | | | | 70, 75, 80, 85, 90, 91, | 90, 91, 92, 93, 94, 95, | APG07682.0 (37.13% identity, 56.43% similarity) |
| | | | | | | 92, 93, 94, 95, 96, 97, | 96, 97, 98, 99, 100 | APG00444.0 US_2016_0355842_A1-93 (35.99% |
| | | | | | | 98, 99, 100 | | identity, 57.82% similarity) |
| | | | | | | | | APG00441.0 US_2016_0355842_A1-91 (35.99% |
| | | | | | | | | identity, 57.52% similarity) |
| | | | | | | | | APG00833.0 US_2016_0355842_A1-175 (35.84% |
| | | | | | | | | identity, 56.36% similarity) |
| | | | | | | | | APG00143.0 US_2016_0355842_A1-4 (34.99% |
| | | | | | | | | identity, 56.56% similarity) |
| | | | | | | | | WP_065845806.1 (32.94% identity, 52.48% |
| | | | | | | | | similarity) |
| | | | | | | | | APG03227.0 (32.26% identity, 53.67% similarity) |
| | | | | | | | | APG03867.0 (30.61% identity, 52.77% similarity) |
| | | | | | | | | APG01087.0 (29.08% identity, 50.74% similarity) |
| | | | | | | | | SDX17518.1 (28.93% identity, 48.6% similarity) |
| | | | | | | | | APG06001.0 (28.2% identity, 44.65% similarity) |
| | | | | | | | | SDW46809.1 (27.81% identity, 46.35% similarity) |
| | | | | | | | | WP_006918908.1 (27.65% identity, 47.94% |
| | | | | | | | | similarity) |
| APG05497.0 | 357 | 358 | | | MTX | 96, 97, 98, 99, 100 | 99, 100 | APG00049.0 US_2016_0304898_A1-78 (95.25% |
| | | | | | | | | identity, 98.64% similarity) |
| | | | | | | | | WP_000730625.1 (94.24% identity, 96.95% |
| | | | | | | | | similarity) |
| | | | | | | | | APG03746.0 (93.9% identity, 97.29% similarity) |
| | | | | | | | | EEM56710.1 (90.88% identity, 93.81% similarity) |
| | | | | | | | | WP_008180054.1 (54.67% identity, 69.67% |
| | | | | | | | | similarity) |
| | | | | | | | | WP_016099228.1 (52.61% identity, 69.61% |
| | | | | | | | | similarity) |
| | | | | | | | | WP_000790613.1 (52.1% identity, 66.34% similarity) |
| | | | | | | | | WP_000163136.1 (50.94% identity, 66.04% |
| | | | | | | | | similarity) |
| | | | | | | | | WP_001036192.1 (49.53% identity, 65.3% similarity) |
| | | | | | | | | US_8461415_B2-31 (48.93% identity, 65.44% |
| | | | | | | | | similarity) |
| | | | | | | | | APG00495.0 (48.93% identity, 62.69% similarity) |
| | | | | | | | | WP_065212007.1 (48.9% identity, 65.93% similarity) |
| | | | | | | | | WP_050822474.1 (48.9% identity, 65.62% similarity) |
| | | | | | | | | APG00013.0 US_2016_0304898_A1-22 (48.58% |
| | | | | | | | | identity, 65.62% similarity) |
| | | | | | | | | APG00693.0 (48.33% identity, 65.05% similarity) |
| | | | | | | | | SFM27417.1 (48.14% identity, 64.29% similarity) |
| | | | | | | | | APG00484.0 US_2016_0355842_A1-105 (46.86% |
| | | | | | | | | identity, 61.64% similarity) |
| | | | | | | | | APG00719.0 US_2016_0355842_A1-164 (46.23% |
| | | | | | | | | identity, 64.78% similarity) |
| | | | | | | | | APG00234.0 US_2016_0304898_A1-207 (45.99% |
| | | | | | | | | identity, 61.72% similarity) |
| | | | | | | | | US_8829279_B2-38 (45.28% identity, 60.91% |
| | | | | | | | | similarity) |
| APG06291.0 | 359 | 360 | | | MTX | 96, 97, 98, 99, 100 | 97, 98, 99, 100 | WP_071770709.1 (96.13% identity, 97.51% |
| | | | | | | | | similarity) |
| | | | | | | | | APG00704.0 US_2016_0355842_A1-161 (95.32% |
| | | | | | | | | identity, 96.69% similarity) |
| | | | | | | | | APG01231.0 (93.94% identity, 95.59% similarity) |
| | | | | | | | | APG00020.0 US_2016_0304898_A1-33 (83.47% |
| | | | | | | | | identity, 89.53% similarity) |
| | | | | | | | | APG00253.0 US_2016_0355842_A1-39 (82.92% |
| | | | | | | | | identity, 88.71% similarity) |
| | | | | | | | | APG01508.0 (82.37% identity, 89.53% similarity) |
| | | | | | | | | APG00764.0 US_2016_0355842_A1-168 (81.36% |
| | | | | | | | | identity, 86.61% similarity) |
| | | | | | | | | APG03995.0 (80.58% identity, 86.88% similarity) |
| | | | | | | | | APG00959.0 US_2016_0355842_A1-194 (80.31% |
| | | | | | | | | identity, 84.78% similarity) |
| | | | | | | | | APG00418.0 US_2016_0355842_A1-84 (79.89% |
| | | | | | | | | identity, 86.23% similarity) |
| | | | | | | | | APG00268.0 US_2016_0355842_A1-45 (79.79% |
| | | | | | | | | identity, 86.09% similarity) |
| | | | | | | | | APG00393.0 US_2016_0355842_A1-76 (79.47% |
| | | | | | | | | identity, 85.0% similarity) |
| | | | | | | | | APG08278.0 (79.27% identity, 86.09% similarity) |
| | | | | | | | | APG00646.0 US_2016_0355842_A1-201 (79.27% |
| | | | | | | | | identity, 85.83% similarity) |
| | | | | | | | | APG00322.0 US_2016_0355842_A1-59 (79.0% |
| | | | | | | | | identity, 84.51% similarity) |
| | | | | | | | | APG00481.0 US_2016_0355842_A1-103 (78.27% |
| | | | | | | | | identity, 84.03% similarity) |
| | | | | | | | | APG00635.0 US_2016_0311864_A1-201 (77.95% |
| | | | | | | | | identity, 84.78% similarity) |
| | | | | | | | | APG00448.0 US_2016_0366881_A1-70 (77.87% |
| | | | | | | | | identity, 84.97% similarity) |
| | | | | | | | | APG00597.0 US_2016_0355842_A1-139 (77.08% |
| | | | | | | | | identity, 82.81% similarity) |
| | | | | | | | | WP_002166885.1 (75.26% identity, 80.53% |
| | | | | | | | | similarity) |
| APG06371.0 | 361 | 362 | | | MTX | 92, 93, 94, 95, 96, 97, | 95, 96, 97, 98, 99, 100 | APG04477.0 (94.94% identity, 96.73% similarity) |
| | | | | | | 98, 99, 100 | | APG00569.0 US_2016_0355842_A1-129 (91.37% |
| | | | | | | | | identity, 93.75% similarity) |
| | | | | | | | | APG00938.0 US_2016_0355842_A1-190 (88.39% |
| | | | | | | | | identity, 94.35% similarity) |
| | | | | | | | | APG00563.0 US_2016_0355842_A1-127 (82.74% |
| | | | | | | | | identity, 88.39% similarity) |
| | | | | | | | | APG09055.0 (82.14% identity, 90.18% similarity) |
| | | | | | | | | APG00794.0 US_2016_0355842_A1-171 (79.53% |
| | | | | | | | | identity, 87.54% similarity) |
| | | | | | | | | APG00387.0 US_2016_0366881_A1-45 (62.06% |
| | | | | | | | | identity, 75.59% similarity) |
| | | | | | | | | APG00590.0 US_2016_0311864_A1-193 (59.18% |
| | | | | | | | | identity, 74.93% similarity) |
| | | | | | | | | APG00146.0 US_2016_0304898_A1-166 (58.28% |
| | | | | | | | | identity, 71.89% similarity) |
| | | | | | | | | WP_000794514.1 (57.52% identity, 71.39% |
| | | | | | | | | similarity) |
| | | | | | | | | US_8318900_B2-78 (56.98% identity, 70.64% |
| | | | | | | | | similarity) |
| | | | | | | | | ANN35530.1 (55.59% identity, 70.29% similarity) |
| | | | | | | | | ANN35739.1 (55.33% identity, 71.6% similarity) |
| APG07577.0 | 363 | 364 | | | Vip4 | 55, 60, 65, 70, 75, 80, | 70, 75, 80, 85, 90, 91, | APG07790.0 (97.92% identity, 98.86% similarity) |
| | | | | | | 85, 90, 91, 92, 93, 94, | 92, 93, 94, 95, 96, 97, | US_2016_0339078_A1-28464 (52.43% identity, |
| | | | | | | 95, 96, 97, 98, 99, 100 | 98, 99, 100 | 66.76% similarity) |
| | | | | | | | | APG09984.0 (51.73% identity, 65.64% similarity) |
| | | | | | | | | APG04931.0 (51.38% identity, 65.75% similarity) |
| | | | | | | | | APG00106.0 US_2016_0304898_A1-134 (51.36% |
| | | | | | | | | identity, 65.39% similarity) |
| | | | | | | | | CA_2844913-129 (49.81% identity, 64.35% |
| | | | | | | | | similarity) |
| | | | | | | | | CA_2844913-130 (49.81% identity, 64.35% |
| | | | | | | | | similarity) |
| | | | | | | | | SCC34829.1 (49.58% identity, 62.7% similarity) |
| | | | | | | | | US_2016_0339078_A1-29674 (49.5% identity, |
| | | | | | | | | 64.68% similarity) |
| | | | | | | | | AGT29561.1 (48.5% identity, 62.19% similarity) |
| | | | | | | | | WP_016123960.1 (48.48% identity, 61.8% similarity) |
| | | | | | | | | APG01474.0 (48.19% identity, 62.25% similarity) |
| | | | | | | | | WP_048561796.1 (48.09% identity, 63.61% |
| | | | | | | | | similarity) |
| | | | | | | | | WP_053512697.1 (48.09% identity, 63.52% |
| | | | | | | | | similarity) |
| | | | | | | | | US_2016_0339078_A1-28124 (48.07% identity, |
| | | | | | | | | 60.39% similarity) |
| | | | | | | | | SCL96146.1 (48.0% identity, 63.43% similarity) |
| | | | | | | | | APG02585.0 (47.34% identity, 61.7% similarity) |
| | | | | | | | | SCC38903.1 (46.53% identity, 62.04% similarity) |
| | | | | | | | | APG09545.0 (45.07% identity, 60.04% similarity) |
| APG07648.0 | 365 | 366 | | | MTX | 5, 10, 15, 20, 25, 30, | 5, 10, 15, 20, 25, 30, | APG06161.0 (92.02% identity, 97.55% similarity) |
| | | | | | | 35, 40, 45, 50, 55, 60, | 35, 40, 45, 50, 55, 60, | APG04640.0 (90.8% identity, 96.32% similarity) |
| | | | | | | 65, 70, 75, 80, 85, 90, | 65, 70, 75, 80, 85, 90, | WP_016099386.1 (86.2% identity, 92.02% similarity) |
| | | | | | | 91, 92, 93, 94, 95, 96, | 91, 92, 93, 94, 95, 96, | APG04804.0 (69.94% identity, 84.66% similarity) |
| | | | | | | 97, 98, 99, 100 | 97, 98, 99, 100 | WP_016084062.1 (68.4% identity, 82.21% similarity) |
| | | | | | | | | WP_016085044.1 (68.4% identity, 82.21% similarity) |
| | | | | | | | | WP_016084449.1 (68.1% identity, 81.9% similarity) |
| | | | | | | | | WP_050845726.1 (67.79% identity, 81.6% similarity) |
| | | | | | | | | APG02293.0 (67.79% identity, 81.29% similarity) |
| | | | | | | | | WP_000823322.1 (67.48% identity, 81.6% similarity) |
| | | | | | | | | WP_016083901.1 (66.56% identity, 80.06% |
| | | | | | | | | similarity) |
| | | | | | | | | WP_016085279.1 (66.56% identity, 79.75% |
| | | | | | | | | similarity) |
| | | | | | | | | WP_016084436.1 (65.95% identity, 79.45% |
| | | | | | | | | similarity) |
| | | | | | | | | APG07036.0 (65.64% identity, 77.91% similarity) |
| APG09231.0 | 367 | | | | MTX | 90, 91, 92, 93, 94, 95, | 93, 94, 95, 96, 97, 98, | APG08589.0 (96.28% identity, 97.64% similarity) |
| | | | | | | 96, 97, 98, 99, 100 | 99, 100 | APG00107.0 US_2016_0311864_A1-21 (86.82% |
| | | | | | | | | identity, 92.91% similarity) |
| | | | | | | | | APG00930.0 US_2016_0311864_A1-397 (86.15% |
| | | | | | | | | identity, 92.23% similarity) |
| | | | | | | | | APG01245.0 US_2016_0311864_A1-398 (85.81% |
| | | | | | | | | identity, 92.57% similarity) |
| | | | | | | | | APG08241.0 (81.82% identity, 91.58% similarity) |
| | | | | | | | | APG07655.0 (79.39% identity, 87.84% similarity) |
| | | | | | | | | APG00155.0 US_2016_0311864_A1-40 (79.05% |
| | | | | | | | | identity, 87.5% similarity) |
| | | | | | | | | APG07639.0 (78.79% identity, 88.89% similarity) |
| | | | | | | | | APG01506.0 (78.72% identity, 88.85% similarity) |
| | | | | | | | | APG08718.0 (78.45% identity, 89.56% similarity) |
| | | | | | | | | WP_000963933.1 (78.45% identity, 89.56% |
| | | | | | | | | similarity) |
| | | | | | | | | CA_2844913-100 (78.04% identity, 89.53% |
| | | | | | | | | similarity) |
| | | | | | | | | APG02638.0 (77.26% identity, 87.29% similarity) |
| | | | | | | | | APG00749.0 (77.0% identity, 86.0% similarity) |
| | | | | | | | | APG03379.0 (76.85% identity, 86.24% similarity) |
| | | | | | | | | APG08088.0 (75.92% identity, 85.62% similarity) |
| | | | | | | | | APG02279.0 (75.82% identity, 86.6% similarity) |
| | | | | | | | | APG09682.0 (75.76% identity, 86.87% similarity) |
| | | | | | | | | APG00847.0 US_2016_0304898_A1-223 (75.66% |
| | | | | | | | | identity, 85.53% similarity) |
| | | | | | | | | APG00201.0 US_2016_0304898_A1-193 (75.0% |
| | | | | | | | | identity, 85.2% similarity) |
| APG00923.0 | 368 | 369, 370 | | | MTX | 97, 98, 99, 100 | 99, 100 | WP_078185377.1 (98.26% identity, 99.01% |
| | | | | | | | | similarity) |
| | | | | | | | | APG06372.0 (98.01% identity, 98.76% similarity) |
| | | | | | | | | KXY21848.1 (97.52% identity, 98.76% similarity) |
| | | | | | | | | CDN39409.1 (97.27% identity, 98.51% similarity) |
| | | | | | | | | APG02362.0 (96.77% identity, 98.01% similarity) |
| | | | | | | | | APG00129.0 US_2016_0304898_A1-158 (96.53% |
| | | | | | | | | identity, 98.51% similarity) |
| | | | | | | | | APG02421.0 (95.86% identity, 96.84% similarity) |
| | | | | | | | | APG02686.0 (95.86% identity, 96.84% similarity) |
| | | | | | | | | WP_080448724.1 (95.86% identity, 96.84% |
| | | | | | | | | similarity) |
| | | | | | | | | APG04650.0 (95.78% identity, 98.26% similarity) |
| | | | | | | | | APG02194.0 (95.78% identity, 98.01% similarity) |
| | | | | | | | | WP_080685552.1 (95.62% identity, 96.59% |
| | | | | | | | | similarity) |
| | | | | | | | | APG08381.0 (93.43% identity, 95.62% similarity) |
| | | | | | | | | OQR53340.1 (91.56% identity, 96.03% similarity) |
| | | | | | | | | APG03337.0 (91.32% identity, 95.53% similarity) |
| APG00941.0 | 371 | 372 | | | Cry | 90, 91, 92, 93, 94, 95, | 92, 93, 94, 95, 96, 97, | APG05930.0 (95.2% identity, 96.38% similarity) |
| | | | | | | 96, 97, 98, 99, 100 | 98, 99, 100 | APG00673.0 (89.69% identity, 91.83% similarity) |
| | | | | | | | | ADK66923.1 (67.99% identity, 77.99% similarity) |
| | | | | | | | | US_8318900_B2-82 (67.78% identity, 77.59% |
| | | | | | | | | similarity) |
| | | | | | | | | US_8461421_B2-91 (67.34% identity, 76.77% |
| | | | | | | | | similarity) |
| | | | | | | | | US_8461421_B2-98 (65.87% identity, 75.71% |
| | | | | | | | | similarity) |
| | | | | | | | | US_8759619_B2-19 (64.35% identity, 74.7% |
| | | | | | | | | similarity) |
| | | | | | | | | APG00974.0 (62.8% identity, 73.56% similarity) |
| | | | | | | | | APG05370.0 (60.79% identity, 71.21% similarity) |
| | | | | | | | | APG06739.0 (60.72% identity, 70.75% similarity) |
| APG01202.0 | 373 | | 374 | | MTX | 85, 90, 91, 92, 93, 94, | 92, 93, 94, 95, 96, 97, | APG08525.0 (92.13% identity, 95.88% similarity) |
| | | | | | | 95, 96, 97, 98, 99, 100 | 98, 99, 100 | APG04793.0 (83.52% identity, 91.39% similarity) |
| | | | | | | | | APG03686.0 (82.77% identity, 91.39% similarity) |
| | | | | | | | | APG04375.0 (82.29% identity, 89.67% similarity) |
| | | | | | | | | OTX35276.1 (82.26% identity, 91.32% similarity) |
| | | | | | | | | APG07676.0 (82.02% identity, 91.01% similarity) |
| | | | | | | | | OUB46342.1 (81.89% identity, 90.94% similarity) |
| | | | | | | | | APG03747.0 (80.52% identity, 90.64% similarity) |
| | | | | | | | | APG00014.0 US_2016_0304898_A1-24 (50.75% |
| | | | | | | | | identity, 66.79% similarity) |
| | | | | | | | | APG04013.0 (47.74% identity, 62.37% similarity) |
| APG01809.0 | 375 | 376 | | | Bin | 60, 65, 70, 75, 80, 85, | 70, 75, 80, 85, 90, 91, | APG06051.0 (91.67% identity, 93.27% similarity) |
| | | | | | | 90, 91, 92, 93, 94, 95, | 92, 93, 94, 95, 96, 97, | WP_016093722.1 (79.67% identity, 81.06% |
| | | | | | | 96, 97, 98, 99, 100 | 98, 99, 100 | similarity) |
| | | | | | | | | APG00215.0 US_2016_0311864_A1-78 (59.33% |
| | | | | | | | | identity, 66.57% similarity) |
| | | | | | | | | OTW86911.1 (57.46% identity, 66.3% similarity) |
| | | | | | | | | APG00880.0 US_2016_0366881_A1-134 (54.57% |
| | | | | | | | | identity, 63.99% similarity) |
| | | | | | | | | APG00386.0 US_2016_0311864_A1-158 (50.97% |
| | | | | | | | | identity, 61.77% similarity) |
| | | | | | | | | WP_002167240.1 (50.94% identity, 61.19% |
| | | | | | | | | similarity) |
| | | | | | | | | WP_048517129.1 (46.41% identity, 57.18% |
| | | | | | | | | similarity) |
| | | | | | | | | WP_002090518.1 (46.13% identity, 57.18% |
| | | | | | | | | similarity) |
| | | | | | | | | US_8829279_B2-4 (36.39% identity, 57.28% |
| | | | | | | | | similarity) |
| APG02194.0 | 377 | 378, 379 | | | MTX | 96, 97, 98, 99, 100 | 99, 100 | APG06372.0 (96.28% identity, 98.76% similarity) |
| | | | | | | | | WP_078185377.1 (96.03% identity, 98.51% |
| | | | | | | | | similarity) |
| | | | | | | | | APG00129.0 US_2016_0304898_A1-158 (95.78% |
| | | | | | | | | identity, 98.01% similarity) |
| | | | | | | | | APG00923.0 (95.78% identity, 98.01% similarity) |
| | | | | | | | | APG04650.0 (95.53% identity, 97.77% similarity) |
| | | | | | | | | KXY21848.1 (95.29% identity, 98.26% similarity) |
| | | | | | | | | CDN39409.1 (95.04% identity, 98.01% similarity) |
| | | | | | | | | APG02362.0 (95.04% identity, 97.77% similarity) |
| | | | | | | | | APG02421.0 (94.16% identity, 96.35% similarity) |
| | | | | | | | | APG02686.0 (93.67% identity, 96.35% similarity) |
| | | | | | | | | WP_080448724.1 (93.67% identity, 96.35% |
| | | | | | | | | similarity) |
| | | | | | | | | WP_080685552.1 (93.43% identity, 96.11% |
| | | | | | | | | similarity) |
| | | | | | | | | OQR53340.1 (91.32% identity, 96.03% similarity) |
| | | | | | | | | APG08381.0 (91.24% identity, 95.38% similarity) |
| | | | | | | | | APG03337.0 (91.07% identity, 95.53% similarity) |
| APG02362.0 | 380 | 382, 381 | | | MTX | 96, 97, 98, 99, 100 | 99, 100 | APG06372.0 (96.77% identity, 98.51% similarity) |
| | | | | | | | | WP_078185377.1 (96.77% identity, 98.26% |
| | | | | | | | | similarity) |
| | | | | | | | | APG00923.0 (96.77% identity, 98.01% similarity) |
| | | | | | | | | KXY21848.1 (96.28% identity, 98.26% similarity) |
| | | | | | | | | CDN39409.1 (96.03% identity, 98.01% similarity) |
| | | | | | | | | APG00129.0 US_2016_0304898_A1-158 (95.78% |
| | | | | | | | | identity, 98.01% similarity) |
| | | | | | | | | APG02421.0 (95.38% identity, 96.11% similarity) |
| | | | | | | | | APG04650.0 (95.29% identity, 98.26% similarity) |
| | | | | | | | | APG02194.0 (95.04% identity, 97.77% similarity) |
| | | | | | | | | APG02686.0 (94.65% identity, 96.35% similarity) |
| | | | | | | | | WP_080448724.1 (94.65% identity, 96.35% |
| | | | | | | | | similarity) |
| | | | | | | | | WP_080685552.1 (94.4% identity, 96.11% similarity) |
| | | | | | | | | APG08381.0 (94.15% identity, 96.1% similarity) |
| | | | | | | | | OQR53340.1 (92.06% identity, 96.53% similarity) |
| | | | | | | | | APG03337.0 (91.81% identity, 96.03% similarity) |
| APG02421.0 | 383 | 384, 385 | | | MTX | 95, 96, 97, 98, 99, 100 | 97, 98, 99, 100 | APG02686.0 (98.3% identity, 99.27% similarity) |
| | | | | | | | | WP_080448724.1 (98.3% identity, 99.27% similarity) |
| | | | | | | | | WP_080685552.1 (98.05% identity, 99.03% |
| | | | | | | | | similarity) |
| | | | | | | | | APG08381.0 (96.35% identity, 98.05% similarity) |
| | | | | | | | | KXY21848.1 (96.11% identity, 97.32% similarity) |
| | | | | | | | | WP_078185377.1 (96.11% identity, 97.32% |
| | | | | | | | | similarity) |
| | | | | | | | | APG06372.0 (95.86% identity, 97.08% similarity) |
| | | | | | | | | CDN39409.1 (95.86% identity, 97.08% similarity) |
| | | | | | | | | APG00923.0 (95.86% identity, 96.84% similarity) |
| | | | | | | | | APG02362.0 (95.38% identity, 96.11% similarity) |
| | | | | | | | | APG00129.0 US_2016_0304898_A1-158 (94.4% |
| | | | | | | | | identity, 96.35% similarity) |
| | | | | | | | | APG04650.0 (94.16% identity, 96.59% similarity) |
| | | | | | | | | APG02194.0 (94.16% identity, 96.35% similarity) |
| | | | | | | | | OQR53340.1 (90.02% identity, 94.4% similarity) |
| APG02686.0 | 386 | 387, 388 | | | MTX | 95, 96, 97, 98, 99, 100 | 97, 98, 99, 100 | WP_080448724.1 (100.0% identity, 100.0% |
| | | | | | | | | similarity) |
| | | | | | | | | WP_080685552.1 (99.76% identity, 99.76% |
| | | | | | | | | similarity) |
| | | | | | | | | APG02421.0 (98.3% identity, 99.27% similarity) |
| | | | | | | | | KXY21848.1 (97.81% identity, 98.05% similarity) |
| | | | | | | | | CDN39409.1 (97.57% identity, 97.81% similarity) |
| | | | | | | | | WP_078185377.1 (96.11% identity, 97.32% |
| | | | | | | | | similarity) |
| | | | | | | | | APG06372.0 (95.86% identity, 97.08% similarity) |
| | | | | | | | | APG00923.0 (95.86% identity, 96.84% similarity) |
| | | | | | | | | APG08381.0 (95.62% identity, 97.81% similarity) |
| | | | | | | | | APG02362.0 (94.65% identity, 96.35% similarity) |
| | | | | | | | | APG00129.0 US_2016_0304898_A1-158 (94.16% |
| | | | | | | | | identity, 96.59% similarity) |
| | | | | | | | | APG04650.0 (93.92% identity, 96.84% similarity) |
| | | | | | | | | APG02194.0 (93.67% identity, 96.35% similarity) |
| APG03297.0 | 389 | 390, 391 | | | MTX | 92, 93, 94, 95, 96, 97, | 94, 95, 96, 97, 98, 99, | WP_003290257.1 (99.67% identity, 100.0% |
| | | | | | | 98, 99, 100 | 100 | similarity) |
| | | | | | | | | APG03746.0 (91.86% identity, 94.14% similarity) |
| | | | | | | | | APG00049.0 US_2016_0304898_A1-78 (91.53% |
| | | | | | | | | identity, 93.81% similarity) |
| | | | | | | | | APG05497.0 (90.88% identity, 93.81% similarity) |
| | | | | | | | | WP_008180054.1 (52.41% identity, 66.88% |
| | | | | | | | | similarity) |
| | | | | | | | | WP_016099228.1 (51.57% identity, 66.67% |
| | | | | | | | | similarity) |
| | | | | | | | | WP_000790613.1 (51.42% identity, 65.62% |
| | | | | | | | | similarity) |
| | | | | | | | | OUB62697.1 (51.1% identity, 67.19% similarity) |
| | | | | | | | | OUB77698.1 (50.62% identity, 63.89% similarity) |
| | | | | | | | | APG00495.0 (50.46% identity, 64.74% similarity) |
| APG03337.0 | 392 | 393 | | | MTX | 92, 93, 94, 95, 96, 97, | 96, 97, 98, 99, 100 | OQR53340.1 (99.26% identity, 99.5% similarity) |
| | | | | | | 98, 99, 100 | | APG04650.0 (91.81% identity, 96.28% similarity) |
| | | | | | | | | APG06372.0 (91.81% identity, 96.28% similarity) |
| | | | | | | | | APG02362.0 (91.81% identity, 96.03% similarity) |
| | | | | | | | | WP_078185377.1 (91.56% identity, 96.03% |
| | | | | | | | | similarity) |
| | | | | | | | | APG00129.0 US_2016_0304898_A1-158 (91.32% |
| | | | | | | | | identity, 95.53% similarity) |
| | | | | | | | | APG00923.0 (91.32% identity, 95.53% similarity) |
| | | | | | | | | KXY21848.1 (91.07% identity, 96.28% similarity) |
| | | | | | | | | CDN39409.1 (91.07% identity, 96.03% similarity) |
| | | | | | | | | APG02194.0 (91.07% identity, 95.53% similarity) |
| APG03352.0 | 394 | 395 | | | MTX | 93, 94, 95, 96, 97, 98, | 95, 96, 97, 98, 99, 100 | APG00597.0 US_2016_0355842_A1-139 (92.39% |
| | | | | | | 99, 100 | | identity, 94.49% similarity) |
| | | | | | | | | APG08278.0 (90.74% identity, 93.12% similarity) |
| | | | | | | | | APG00764.0 US_2016_0355842_A1-168 (89.95% |
| | | | | | | | | identity, 93.12% similarity) |
| | | | | | | | | APG00393.0 US_2016_0355842_A1-76 (88.59% |
| | | | | | | | | identity, 92.31% similarity) |
| | | | | | | | | APG00481.0 US_2016_0355842_A1-103 (88.13% |
| | | | | | | | | identity, 92.61% similarity) |
| | | | | | | | | APG00268.0 US_2016_0355842_A1-45 (87.83% |
| | | | | | | | | identity, 92.06% similarity) |
| | | | | | | | | APG00322.0 US_2016_0355842_A1-59 (87.8% |
| | | | | | | | | identity, 92.31% similarity) |
| | | | | | | | | APG00635.0 US_2016_0311864_A1-201 (86.77% |
| | | | | | | | | identity, 91.8% similarity) |
| | | | | | | | | APG03995.0 (86.51% identity, 91.01% similarity) |
| | | | | | | | | APG00959.0 US_2016_0355842_A1-194 (86.47% |
| | | | | | | | | identity, 91.25% similarity) |
| APG03422.0 | 396 | | | | MTX | 90, 91, 92, 93, 94, 95, | 91, 92, 93, 94, 95, 96, | APG06372.0 (90.41% identity, 91.55% similarity) |
| | | | | | | 96, 97, 98, 99, 100 | 97, 98, 99, 100 | WP_078185377.1 (90.18% identity, 91.32% |
| | | | | | | | | similarity) |
| | | | | | | | | APG02421.0 (89.5% identity, 91.1% similarity) |
| | | | | | | | | APG02686.0 (89.5% identity, 91.1% similarity) |
| | | | | | | | | WP_080448724.1 (89.5% identity, 91.1% similarity) |
| | | | | | | | | APG00923.0 (89.5% identity, 90.41% similarity) |
| | | | | | | | | WP_080685552.1 (89.27% identity, 90.87% |
| | | | | | | | | similarity) |
| | | | | | | | | KXY21848.1 (89.04% identity, 90.64% similarity) |
| | | | | | | | | CDN39409.1 (88.81% identity, 90.41% similarity) |
| | | | | | | | | APG04650.0 (88.36% identity, 90.64% similarity) |
| | | | | | | | | APG02194.0 (88.36% identity, 90.41% similarity) |
| | | | | | | | | APG02362.0 (88.36% identity, 90.18% similarity) |
| APG03438.0 | 397 | 398 | | | Cry | 5, 10, 15, 20, 25, 30, | 5, 10, 15, 20, 25, 30, | APG09824.0 (98.37% identity, 98.84% similarity) |
| | | | | | | 35, 40, 45, 50, 55, 60, | 35, 40, 45, 50, 55, 60, | APG05978.0 (96.12% identity, 96.8% similarity) |
| | | | | | | 65, 70, 75, 80, 85, 90, | 65, 70, 75, 80, 85, 90, | APG04458.0 (95.81% identity, 97.67% similarity) |
| | | | | | | 91, 92, 93, 94, 95, 96, | 91, 92, 93, 94, 95, 96, | KNB72291.1 (95.81% identity, 97.67% similarity) |
| | | | | | | 97, 98, 99, 100 | 97, 98, 99, 100 | APG09936.0 (95.35% identity, 96.98% similarity) |
| | | | | | | | | WP_084765780.1 (94.08% identity, 95.67% |
| | | | | | | | | similarity) |
| | | | | | | | | SEE67477.1 (37.75% identity, 58.65% similarity) |
| | | | | | | | | WP_036155538.1 (30.51% identity, 50.21% |
| | | | | | | | | similarity) |
| | | | | | | | | EXX63903.1 (29.78% identity, 50.0% similarity) |
| APG03891.0 | 399 | | | | MTX | 96, 97, 98, 99, 100 | 98, 99, 100 | APG00601.0 US_2016_0355842_A1-141 (95.36% |
| | | | | | | | | identity, 96.43% similarity) |
| | | | | | | | | APG00021.0 US_2016_0304898_A1-35 (95.0% |
| | | | | | | | | identity, 97.5% similarity) |
| | | | | | | | | APG03249.0 (95.0% identity, 96.07% similarity) |
| | | | | | | | | APG00091.0 US_2016_0304898_A1-120 (92.86% |
| | | | | | | | | identity, 94.64% similarity) |
| | | | | | | | | US_8461421_B2-74 (90.71% identity, 95.36% |
| | | | | | | | | similarity) |
| | | | | | | | | APG00850.0 US_2016_0355842_A1-178 (77.82% |
| | | | | | | | | identity, 89.82% similarity) |
| | | | | | | | | US_9567381_B2-384 (32.06% identity, 47.74% |
| | | | | | | | | similarity) |
| | | | | | | | | ANN35810.1 (31.72% identity, 46.55% similarity) |
| | | | | | | | | US_8461421_B2-102 (31.4% identity, 46.08% |
| | | | | | | | | similarity) |
| | | | | | | | | US_2015_0047076_A1-10 (31.14% identity, 46.02% |
| | | | | | | | | similarity) |
| APG04251.0 | 400 | 401 | | | MTX | 5, 10, 15, 20, 25, 30, | 5, 10, 15, 20, 25, 30, | WP_016085044.1 (100.0% identity, 100.0% |
| | | | | | | 35, 40, 45, 50, 55, 60, | 35, 40, 45, 50, 55, 60, | similarity) |
| | | | | | | 65, 70, 75, 80, 85, 90, | 65, 70, 75, 80, 85, 90, | WP_016084062.1 (99.69% identity, 99.69% |
| | | | | | | 91, 92, 93, 94, 95, 96, | 91, 92, 93, 94, 95, 96, | similarity) |
| | | | | | | 97, 98, 99, 100 | 97, 98, 99, 100 | WP_016084449.1 (99.39% identity, 99.69% |
| | | | | | | | | similarity) |
| | | | | | | | | APG05337.0 (97.24% identity, 98.47% similarity) |
| | | | | | | | | WP_050845726.1 (97.24% identity, 98.47% |
| | | | | | | | | similarity) |
| | | | | | | | | OUB25269.1 (96.93% identity, 98.16% similarity) |
| | | | | | | | | APG02293.0 (96.32% identity, 98.16% similarity) |
| | | | | | | | | WP_000823322.1 (96.32% identity, 97.55% |
| | | | | | | | | similarity) |
| | | | | | | | | APG04806.0 (94.79% identity, 96.63% similarity) |
| | | | | | | | | APG07936.0 (94.79% identity, 96.63% similarity) |
| | | | | | | | | WP_016083901.1 (94.17% identity, 96.01% |
| | | | | | | | | similarity) |
| | | | | | | | | WP_016085279.1 (93.25% identity, 95.4% similarity) |
| | | | | | | | | WP_016084436.1 (92.64% identity, 95.09% |
| | | | | | | | | similarity) |
| | | | | | | | | APG07036.0 (90.8% identity, 93.25% similarity) |
| APG04458.0 | 402 | 403 | | | Cry | 5, 10, 15, 20, 25, 30, | 5, 10, 15, 20, 25, 30, | KNB72291.1 (98.83% identity, 99.3% similarity) |
| | | | | | | 35, 40, 45, 50, 55, 60, | 35, 40, 45, 50, 55, 60, | WP_084765780.1 (97.03% identity, 97.26% |
| | | | | | | 65, 70, 75, 80, 85, 90, | 65, 70, 75, 80, 85, 90, | similarity) |
| | | | | | | 91, 92, 93, 94, 95, 96, | 91, 92, 93, 94, 95, 96, | APG03438.0 (95.81% identity, 97.67% similarity) |
| | | | | | | 97, 98, 99, 100 | 97, 98, 99, 100 | APG09824.0 (95.35% identity, 97.21% similarity) |
| | | | | | | | | APG09936.0 (94.64% identity, 96.5% similarity) |
| | | | | | | | | APG05978.0 (93.38% identity, 95.21% similarity) |
| | | | | | | | | SEE67477.1 (37.16% identity, 58.33% similarity) |
| | | | | | | | | WP_036155538.1 (30.23% identity, 50.11% |
| | | | | | | | | similarity) |
| | | | | | | | | EXX63903.1 (29.17% identity, 50.22% similarity) |
| APG04650.0 | 404 | 405, 406 | | | MTX | 98, 99, 100 | 99, 100 | APG00129.0 US_2016_0304898_A1-158 (97.02% |
| | | | | | | | | identity, 98.26% similarity) |
| | | | | | | | | WP_078185377.1 (96.03% identity, 98.76% |
| | | | | | | | | similarity) |
| | | | | | | | | APG06372.0 (95.78% identity, 98.51% similarity) |
| | | | | | | | | APG00923.0 (95.78% identity, 98.26% similarity) |
| | | | | | | | | KXY21848.1 (95.53% identity, 98.76% similarity) |
| | | | | | | | | CDN39409.1 (95.53% identity, 98.51% similarity) |
| | | | | | | | | APG02194.0 (95.53% identity, 97.77% similarity) |
| | | | | | | | | APG02362.0 (95.29% identity, 98.26% similarity) |
| | | | | | | | | APG02421.0 (94.16% identity, 96.59% similarity) |
| | | | | | | | | APG02686.0 (93.92% identity, 96.84% similarity) |
| | | | | | | | | WP_080448724.1 (93.92% identity, 96.84% |
| | | | | | | | | similarity) |
| | | | | | | | | WP_080685552.1 (93.92% identity, 96.59% |
| | | | | | | | | similarity) |
| | | | | | | | | OQR53340.1 (92.06% identity, 96.77% similarity) |
| | | | | | | | | APG03337.0 (91.81% identity, 96.28% similarity) |
| | | | | | | | | APG08381.0 (91.0% identity, 95.13% similarity) |
| APG04806.0 | 407 | 408 | | | MTX | 5, 10, 15, 20, 25, 30, | 5, 10, 15, 20, 25, 30, | APG05337.0 (96.93% identity, 98.16% similarity) |
| | | | | | | 35, 40, 45, 50, 55, 60, | 35, 40, 45, 50, 55, 60, | WP_050845726.1 (96.93% identity, 98.16% |
| | | | | | | 65, 70, 75, 80, 85, 90, | 65, 70, 75, 80, 85, 90, | similarity) |
| | | | | | | 91, 92, 93, 94, 95, 96, | 91, 92, 93, 94, 95, 96, | OUB25269.1 (96.63% identity, 97.85% similarity) |
| | | | | | | 97, 98, 99, 100 | 97, 98, 99, 100 | APG02293.0 (96.01% identity, 97.24% similarity) |
| | | | | | | | | WP_000823322.1 (96.01% identity, 97.24% |
| | | | | | | | | similarity) |
| | | | | | | | | WP_016084062.1 (95.09% identity, 96.93% |
| | | | | | | | | similarity) |
| | | | | | | | | WP_016084449.1 (95.09% identity, 96.93% |
| | | | | | | | | similarity) |
| | | | | | | | | APG04251.0 (94.79% identity, 96.63% similarity) |
| | | | | | | | | APG07936.0 (94.79% identity, 96.63% similarity) |
| | | | | | | | | WP_016085044.1 (94.79% identity, 96.63% |
| | | | | | | | | similarity) |
| | | | | | | | | WP_016084436.1 (94.79% identity, 96.01% |
| | | | | | | | | similarity) |
| | | | | | | | | WP_016083901.1 (93.87% identity, 95.71% |
| | | | | | | | | similarity) |
| | | | | | | | | WP_016085279.1 (93.87% identity, 95.71% |
| | | | | | | | | similarity) |
| | | | | | | | | APG07036.0 (91.1% identity, 92.33% similarity) |
| APG05226.0 | 409 | 410 | | | MTX | 90, 91, 92, 93, 94, 95, | 95, 96, 97, 98, 99, 100 | WP_062673074.1 (98.79% identity, 99.09% |
| | | | | | | 96, 97, 98, 99, 100 | | similarity) |
| | | | | | | | | WP_079243808.1 (91.82% identity, 96.97% |
| | | | | | | | | similarity) |
| | | | | | | | | WP_047426867.1 (91.82% identity, 96.36% |
| | | | | | | | | similarity) |
| | | | | | | | | APG03072.0 (91.52% identity, 96.06% similarity) |
| | | | | | | | | WP_076596488.1 (90.61% identity, 94.24% |
| | | | | | | | | similarity) |
| | | | | | | | | APG07574.0 (88.18% identity, 93.33% similarity) |
| | | | | | | | | APG03185.0 (87.88% identity, 94.24% similarity) |
| | | | | | | | | WP_077413348.1 (86.71% identity, 93.05% |
| | | | | | | | | similarity) |
| | | | | | | | | APG02518.0 (86.1% identity, 92.75% similarity) |
| | | | | | | | | APG03114.0 (78.25% identity, 90.03% similarity) |
| APG05337.0 | 411 | 412 | | | MTX | 5, 10, 15, 20, 25, 30, | 5, 10, 15, 20, 25, 30, | WP_050845726.1 (99.39% identity, 100.0% |
| | | | | | | 35, 40, 45, 50, 55, 60, | 35, 40, 45, 50, 55, 60, | similarity) |
| | | | | | | 65, 70, 75, 80, 85, 90, | 65, 70, 75, 80, 85, 90, | OUB25269.1 (98.47% identity, 99.69% similarity) |
| | | | | | | 91, 92, 93, 94, 95, 96, | 91, 92, 93, 94, 95, 96, | WP_000823322.1 (98.47% identity, 99.08% |
| | | | | | | 97, 98, 99, 100 | 97, 98, 99, 100 | similarity) |
| | | | | | | | | APG02293.0 (97.55% identity, 99.39% similarity) |
| | | | | | | | | WP_016084062.1 (97.55% identity, 98.77% |
| | | | | | | | | similarity) |
| | | | | | | | | APG04251.0 (97.24% identity, 98.47% similarity) |
| | | | | | | | | WP_016085044.1 (97.24% identity, 98.47% |
| | | | | | | | | similarity) |
| | | | | | | | | APG04806.0 (96.93% identity, 98.16% similarity) |
| | | | | | | | | APG07936.0 (96.93% identity, 98.16% similarity) |
| | | | | | | | | WP_016084449.1 (96.63% identity, 98.16% |
| | | | | | | | | similarity) |
| | | | | | | | | WP_016085279.1 (95.4% identity, 96.93% similarity) |
| | | | | | | | | WP_016083901.1 (95.09% identity, 96.93% |
| | | | | | | | | similarity) |
| | | | | | | | | WP_016084436.1 (94.79% identity, 96.63% |
| | | | | | | | | similarity) |
| | | | | | | | | APG07036.0 (92.94% identity, 94.17% similarity) |
| APG06330.0 | 413 | 414, 415 | | | Bin | 95, 96, 97, 98, 99, 100 | 97, 98, 99, 100 | APG00118.0 US_2016_0311864_A1-28 (94.47% |
| | | | | | | | | identity, 96.54% similarity) |
| | | | | | | | | APG01790.0 (94.47% identity, 96.54% similarity) |
| | | | | | | | | APG00454.0 US_2016_0311864_A1-179 (90.78% |
| | | | | | | | | identity, 95.62% similarity) |
| | | | | | | | | APG00335.0 US_2016_0366881_A1-18 (90.55% |
| | | | | | | | | identity, 95.62% similarity) |
| | | | | | | | | APG00223.0 US_2016_0311864_A1-82 (90.55% |
| | | | | | | | | identity, 95.39% similarity) |
| | | | | | | | | APG00242.0 US_2016_0311864_A1-93 (90.32% |
| | | | | | | | | identity, 95.39% similarity) |
| | | | | | | | | APG00913.0 US_2016_0311864_A1-226 (88.25% |
| | | | | | | | | identity, 91.57% similarity) |
| | | | | | | | | WP_002187944.1 (87.1% identity, 88.48% similarity) |
| | | | | | | | | WP_078212086.1 (81.34% identity, 85.94% |
| | | | | | | | | similarity) |
| | | | | | | | | CA_2844913-10 (81.11% identity, 86.64% similarity) |
| APG06841.0 | 416 | 417 | | | MTX | 5, 10, 15, 20, 25, 30, | 5, 10, 15, 20, 25, 30, | OUB72081.1 (97.86% identity, 99.08% similarity) |
| | | | | | | 35, 40, 45, 50, 55, 60, | 35, 40, 45, 50, 55, 60, | OUB84419.1 (95.41% identity, 97.25% similarity) |
| | | | | | | 65, 70, 75, 80, 85, 90, | 65, 70, 75, 80, 85, 90, | APG04640.0 (94.19% identity, 96.64% similarity) |
| | | | | | | 91, 92, 93, 94, 95, 96, | 91, 92, 93, 94, 95, 96, | APG06161.0 (88.07% identity, 93.27% similarity) |
| | | | | | | 97, 98, 99, 100 | 97, 98, 99, 100 | APG07648.0 (85.32% identity, 92.97% similarity) |
| | | | | | | | | OUA87853.1 (85.02% identity, 92.05% similarity) |
| | | | | | | | | EOP79330.1 (80.73% identity, 87.16% similarity) |
| | | | | | | | | OUB80918.1 (79.82% identity, 90.52% similarity) |
| | | | | | | | | APG04804.0 (70.03% identity, 83.18% similarity) |
| | | | | | | | | APG04251.0 (67.89% identity, 81.65% similarity) |
| | | | | | | | | WP_016084062.1 (67.89% identity, 81.65% |
| | | | | | | | | similarity) |
| | | | | | | | | WP_016085044.1 (67.89% identity, 81.65% |
| | | | | | | | | similarity) |
| APG07160.0 | 418 | 419, 420 | | | MTX | 5, 10, 15, 20, 25, 30, | 5, 10, 15, 20, 25, 30, | WP_006675125.1 (91.67% identity, 91.67% |
| | | | | | | 35, 40, 45, 50, 55, 60, | 35, 40, 45, 50, 55, 60, | similarity) |
| | | | | | | 65, 70, 75, 80, 85, 90, | 65, 70, 75, 80, 85, 90, | APG02408.0 (91.05% identity, 95.06% similarity) |
| | | | | | | 91, 92, 93, 94, 95, 96, | 91, 92, 93, 94, 95, 96, | WP_019421057.1 (74.62% identity, 85.63% |
| | | | | | | 97, 98, 99, 100 | 97, 98, 99, 100 | similarity) |
| | | | | | | | | WP_006285537.1 (72.75% identity, 82.34% |
| | | | | | | | | similarity) |
| | | | | | | | | WP_016083901.1 (47.79% identity, 64.31% |
| | | | | | | | | similarity) |
| | | | | | | | | APG04804.0 (47.48% identity, 65.58% similarity) |
| | | | | | | | | APG05337.0 (47.2% identity, 64.31% similarity) |
| | | | | | | | | WP_050845726.1 (47.2% identity, 64.31% similarity) |
| | | | | | | | | OUB25269.1 (47.2% identity, 64.01% similarity) |
| | | | | | | | | APG02293.0 (47.2% identity, 63.72% similarity) |
| APG07724.0 | 421 | 422 | | | Cry | 75, 80, 85, 90, 91, 92, | 85, 90, 91, 92, 93, 94, | APG01780.0 (97.09% identity, 97.95% similarity) |
| | | | | | | 93, 94, 95, 96, 97, 98, | 95, 96, 97, 98, 99, 100 | APG07803.0 (73.0% identity, 81.24% similarity) |
| | | | | | | 99, 100 | | US_8461421_B2-68 (71.22% identity, 82.23% |
| | | | | | | | | similarity) |
| | | | | | | | | APG00007.0 US_2016_0304898_A1-11 (71.14% |
| | | | | | | | | identity, 82.31% similarity) |
| | | | | | | | | APG06253.0 (69.73% identity, 79.85% similarity) |
| | | | | | | | | APG00188.0 US_2016_0311864_A1-57 (69.44% |
| | | | | | | | | identity, 79.48% similarity) |
| | | | | | | | | APG01915.0 (64.5% identity, 75.34% similarity) |
| | | | | | | | | APG00912.0 (45.51% identity, 58.6% similarity) |
| | | | | | | | | AEH76820.1 (45.11% identity, 58.72% similarity) |
| | | | | | | | | CA_2844913-48 (44.83% identity, 57.22% similarity) |
| APG07936.0 | 423 | 424 | | | MTX | 5, 10, 15, 20, 25, 30, | 5, 10, 15, 20, 25, 30, | WP_050845726.1 (97.24% identity, 98.47% |
| | | | | | | 35, 40, 45, 50, 55, 60, | 35, 40, 45, 50, 55, 60, | similarity) |
| | | | | | | 65, 70, 75, 80, 85, 90, | 65, 70, 75, 80, 85, 90, | APG05337.0 (96.93% identity, 98.16% similarity) |
| | | | | | | 91, 92, 93, 94, 95, 96, | 91, 92, 93, 94, 95, 96, | OUB25269.1 (96.32% identity, 98.16% similarity) |
| | | | | | | 97, 98, 99, 100 | 97, 98, 99, 100 | WP_000823322.1 (96.32% identity, 97.55% |
| | | | | | | | | similarity) |
| | | | | | | | | APG02293.0 (96.01% identity, 97.85% similarity) |
| | | | | | | | | WP_016084062.1 (95.09% identity, 96.93% |
| | | | | | | | | similarity) |
| | | | | | | | | APG04251.0 (94.79% identity, 96.63% similarity) |
| | | | | | | | | APG04806.0 (94.79% identity, 96.63% similarity) |
| | | | | | | | | WP_016085044.1 (94.79% identity, 96.63% |
| | | | | | | | | similarity) |
| | | | | | | | | WP_016084449.1 (94.79% identity, 96.32% |
| | | | | | | | | similarity) |
| | | | | | | | | WP_016085279.1 (93.56% identity, 95.71% |
| | | | | | | | | similarity) |
| | | | | | | | | WP_016083901.1 (92.94% identity, 96.01% |
| | | | | | | | | similarity) |
| | | | | | | | | WP_016084436.1 (92.94% identity, 95.4% similarity) |
| | | | | | | | | APG07036.0 (91.72% identity, 93.56% similarity) |
| APG08381.0 | 425 | 426 | | | MTX | 92, 93, 94, 95, 96, 97, | 95, 96, 97, 98, 99, 100 | APG02421.0 (96.35% identity, 98.05% similarity) |
| | | | | | | 98, 99, 100 | | APG02686.0 (95.62% identity, 97.81% similarity) |
| | | | | | | | | WP_080448724.1 (95.62% identity, 97.81% |
| | | | | | | | | similarity) |
| | | | | | | | | WP_080685552.1 (95.38% identity, 97.57% |
| | | | | | | | | similarity) |
| | | | | | | | | APG02362.0 (94.15% identity, 96.1% similarity) |
| | | | | | | | | APG06372.0 (93.43% identity, 96.11% similarity) |
| | | | | | | | | KXY21848.1 (93.43% identity, 95.86% similarity) |
| | | | | | | | | WP_078185377.1 (93.43% identity, 95.86% |
| | | | | | | | | similarity) |
| | | | | | | | | APG00923.0 (93.43% identity, 95.62% similarity) |
| | | | | | | | | CDN39409.1 (93.19% identity, 95.62% similarity) |
| | | | | | | | | APG02194.0 (91.24% identity, 95.38% similarity) |
| | | | | | | | | APG00129.0 US_2016_0304898_A1-158 (91.24% |
| | | | | | | | | identity, 94.89% similarity) |
| | | | | | | | | APG04650.0 (91.0% identity, 95.13% similarity) |
| APG09755.0 | 427 | 428 | | | MTX | 97, 98, 99, 100 | 99, 100 | APG00704.0 US_2016_0355842_A1-161 (96.42% |
| | | | | | | | | identity, 98.62% similarity) |
| | | | | | | | | APG06291.0 (93.66% identity, 96.69% similarity) |
| | | | | | | | | APG01231.0 (93.39% identity, 96.14% similarity) |
| | | | | | | | | WP_071770709.1 (93.11% identity, 95.32% |
| | | | | | | | | similarity) |
| | | | | | | | | APG00020.0 US_2016_0304898_A1-33 (81.59% |
| | | | | | | | | identity, 88.46% similarity) |
| | | | | | | | | APG00253.0 US_2016_0355842_A1-39 (80.77% |
| | | | | | | | | identity, 87.09% similarity) |
| | | | | | | | | APG01508.0 (80.49% identity, 87.91% similarity) |
| | | | | | | | | APG00764.0 US_2016_0355842_A1-168 (78.8% |
| | | | | | | | | identity, 84.03% similarity) |
| | | | | | | | | APG03995.0 (78.27% identity, 85.34% similarity) |
| | | | | | | | | APG00418.0 US_2016_0355842_A1-84 (77.75% |
| | | | | | | | | identity, 84.62% similarity) |
| APG09824.0 | 429 | 430 | | | Cry | 5, 10, 15, 20, 25, 30, | 5, 10, 15, 20, 25, 30, | APG03438.0 (98.37% identity, 98.84% similarity) |
| | | | | | | 35, 40, 45, 50, 55, 60, | 35, 40, 45, 50, 55, 60, | APG05978.0 (96.35% identity, 97.03% similarity) |
| | | | | | | 65, 70, 75, 80, 85, 90, | 65, 70, 75, 80, 85, 90, | APG04458.0 (95.35% identity, 97.21% similarity) |
| | | | | | | 91, 92, 93, 94, 95, 96, | 91, 92, 93, 94, 95, 96, | KNB72291.1 (95.35% identity, 97.21% similarity) |
| | | | | | | 97, 98, 99, 100 | 97, 98, 99, 100 | APG09936.0 (95.35% identity, 96.98% similarity) |
| | | | | | | | | WP_084765780.1 (93.62% identity, 95.22% |
| | | | | | | | | similarity) |
| | | | | | | | | SEE67477.1 (37.75% identity, 58.65% similarity) |
| | | | | | | | | WP_036155538.1 (31.57% identity, 50.42% |
| | | | | | | | | similarity) |
| | | | | | | | | EXX63903.1 (29.26% identity, 49.56% similarity) |
| APG01515.0 | 431 | 432 | 433 | | Cry | 75, 80, 85, 90, 91, 92, | 85, 90, 91, 92, 93, 94, | APG07724.0 (93.39% identity, 95.51% similarity) |
| | | | | | | 93, 94, 95, 96, 97, 98, | 95, 96, 97, 98, 99, 100 | APG01780.0 (92.20% identity, 95.04% similarity) |
| | | | | | | 99, 100 | | APG07803.0 (75.97% identity, 82.66% similarity) |
| | | | | | | | | APG00007.0 US_2016_0304898_A1-11 (72.15% |
| | | | | | | | | identity, 83.09% similarity) |
| | | | | | | | | APG00188.0 US_2016_0311864_A1-57 (71.72% |
| | | | | | | | | identity, 80.83% similarity) |
| | | | | | | | | APG06253.0 (70.97% identity, 80.14% similarity) |
| | | | | | | | | US_8461421_B2-68 (69.36% identity, 81.38% |
| | | | | | | | | similarity) |
| | | | | | | | | APG01915.0 (63.28% identity, 74.81% similarity) |
| | | | | | | | | WP_087949412.1 (45.93% identity, 59.19% |
| | | | | | | | | similarity) |
| | | | | | | | | APG00912.0 US_2017_0175134_A1-175 (45.66% |
| | | | | | | | | identity, 58.54% similarity) |
| APG01949.0 | 434 | | | | MTX | 5, 10, 15, 20, 25, 30, | 5, 10, 15, 20, 25, 30, | APG05337.0 (98.16% identity, 99.39% similarity) |
| | | | | | | 35, 40, 45, 50, 55, 60, | 35, 40, 45, 50, 55, 60, | WP_050845726.1 (98.16% identity, 99.39% |
| | | | | | | 65, 70, 75, 80, 85, 90, | 65, 70, 75, 80, 85, 90, | similarity) |
| | | | | | | 91, 92, 93, 94, 95, 96, | 91, 92, 93, 94, 95, 96, | WP_086397429.1 (97.24% identity, 99.08% |
| | | | | | | 97, 98, 99, 100 | 97, 98, 99, 100 | similarity) |
| | | | | | | | | WP_000823322.1 (97.24% identity, 98.47% |
| | | | | | | | | similarity) |
| | | | | | | | | APG02293.0 (96.32% identity, 98.77% similarity) |
| | | | | | | | | APG07936.0 (96.32% identity, 97.55% similarity) |
| | | | | | | | | WP_016084062.1 (95.71% identity, 98.16% |
| | | | | | | | | similarity) |
| | | | | | | | | APG04806.0 (95.71% identity, 97.55% similarity) |
| | | | | | | | | APG04251.0 (95.40% identity, 97.85% similarity) |
| | | | | | | | | WP_016085044.1 (95.40% identity, 97.85% |
| | | | | | | | | similarity) |
| | | | | | | | | WP_016084449.1 (95.40% identity, 97.55% |
| | | | | | | | | similarity) |
| | | | | | | | | WP_016085279.1 (94.17% identity, 96.32% |
| | | | | | | | | similarity) |
| | | | | | | | | WP_016084436.1 (93.56% identity, 96.01% |
| | | | | | | | | similarity) |
| | | | | | | | | WP_016083901.1 (93.25% identity, 96.32% |
| | | | | | | | | similarity) |
| | | | | | | | | APG07036.0 (91.72% identity, 93.56% similarity) |
| APG02436.0 | 435 | 436 | | | MTX | 96, 97, 98, 99, 100 | 97, 98, 99, 100 | APG00322.0 US_2016_0355842_A1-59 (95.20% |
| | | | | | | | | identity, 96.27% similarity) |
| | | | | | | | | APG00481.0 US_2016_0355842_A1-103 (94.68% |
| | | | | | | | | identity, 95.74% similarity) |
| | | | | | | | | APG00268.0 US_2016_0355842_A1-45 (94.41% |
| | | | | | | | | identity, 96.01% similarity) |
| | | | | | | | | APG03995.0 (91.49% identity, 94.41% similarity) |
| | | | | | | | | APG08278.0 (90.16% identity, 94.15% similarity) |
| | | | | | | | | APG00646.0 US_2016_0355842_A1-201 (90.16% |
| | | | | | | | | identity, 93.88% similarity) |
| | | | | | | | | APG00635.0 US_2016_0311864_A1-201 (88.56% |
| | | | | | | | | identity, 91.49% similarity) |
| | | | | | | | | APG00393.0 US_2016_0355842_A1-76 (87.73% |
| | | | | | | | | identity, 92.00% similarity) |
| | | | | | | | | APG03352.0 (87.53% identity, 91.25% similarity) |
| | | | | | | | | APG00764.0 US_2016_0355842_A1-168 (86.97% |
| | | | | | | | | identity, 91.49% similarity) |
| APG02554.0 | 437 | | | | MTX | 85, 90, 91, 92, 93, 94, | 90, 91, 92, 93, 94, 95, | APG09682.0 (95.62% identity, 98.65% similarity) |
| | | | | | | 95, 96, 97, 98, 99, 100 | 96, 97, 98, 99, 100 | APG00201.0 US_2016_0304898_A1-193 (80.92% |
| | | | | | | | | identity, 87.17% similarity) |
| | | | | | | | | APG00847.0 US_2016_0304898_A1-223 (80.59% |
| | | | | | | | | identity, 87.17% similarity) |
| | | | | | | | | APG03379.0 (79.87% identity, 87.58% similarity) |
| | | | | | | | | APG08241.0 (79.80% identity, 88.55% similarity) |
| | | | | | | | | APG07639.0 (79.80% identity, 88.22% similarity) |
| | | | | | | | | APG02279.0 (79.41% identity, 87.25% similarity) |
| | | | | | | | | APG08718.0 (79.12% identity, 88.89% similarity) |
| | | | | | | | | WP_000963933.1 (79.12% identity, 88.89% |
| | | | | | | | | similarity) |
| | | | | | | | | CA_2844913-100 (79.12% identity, 88.55% |
| | | | | | | | | similarity) |
| APG02886.0 | 438 | 439 | | | Cyt | 85, 90, 91, 92, 93, 94, | 90, 91, 92, 93, 94, 95, | APG04725.0 (90.17% identity, 94.02% similarity) |
| | | | | | | 95, 96, 97, 98, 99, 100 | 96, 97, 98, 99, 100 | APG00126.0 US_2016_0304898_A1-153 (82.08% |
| | | | | | | | | identity, 89.17% similarity) |
| | | | | | | | | WP_016110460.1 (80.50% identity, 87.97% |
| | | | | | | | | similarity) |
| | | | | | | | | APG08631.0 (77.20% identity, 84.00% similarity) |
| | | | | | | | | APG00437.0 US_2016_0366881_A1-62 (77.20% |
| | | | | | | | | identity, 82.80% similarity) |
| | | | | | | | | APG07961.0 (59.75% identity, 76.76% similarity) |
| | | | | | | | | APG00177.0 US_2016_0311864_A1-52 (55.95% |
| | | | | | | | | identity, 73.81% similarity) |
| | | | | | | | | APG08230.0 (55.95% identity, 73.81% similarity) |
| | | | | | | | | WP_016110459.1 (55.56% identity, 71.60% |
| | | | | | | | | similarity) |
| | | | | | | | | APG00128.0 US_2016_0304898_A1-157 (55.56% |
| | | | | | | | | identity, 71.19% similarity) |
| APG03861.0 | 440 | 441, 442 | | | MTX | 35, 40, 45, 50, 55, 60, | 50, 55, 60, 65, 70, 75, | APG07783.0 (97.59% identity, 98.49% similarity) |
| | | | | | | 65, 70, 75, 80, 85, 90, | 80, 85, 90, 91, 92, 93, | APG00276.0 US_2016_0355842_A1-47 (33.43% |
| | | | | | | 91, 92, 93, 94, 95, 96, | 94, 95, 96, 97, 98, 99, | identity, 47.67% similarity) |
| | | | | | | 97, 98, 99, 100 | 100 | APG00545.0 US_2016_0355842_A1-122 (31.81% |
| | | | | | | | | identity, 46.42% similarity) |
| | | | | | | | | APG00671.0 US_2016_0355842_A1-157 (29.39% |
| | | | | | | | | identity, 48.41% similarity) |
| | | | | | | | | APG00362.0 US_2016_0366881_A1-33 (29.13% |
| | | | | | | | | identity, 43.98% similarity) |
| | | | | | | | | WP_061885189.1 (28.12% identity, 44.03% |
| | | | | | | | | similarity) |
| | | | | | | | | APG00552.0 US_2016_0366881_A1-110 (27.87% |
| | | | | | | | | identity, 41.26% similarity) |
| | | | | | | | | WP_088118891.1 (27.84% identity, 44.03% |
| | | | | | | | | similarity) |
| APG04374.0 | 443 | 444, 445, 446 | | | Cry | 90, 91, 92, 93, 94, 95, | 95, 96, 97, 98, 99, 100 | APG01644.0 (91.05% identity, 94.30% similarity) |
| | | | | | | 96, 97, 98, 99, 100 | | APG00110.0 US_2016_0177333_A1-60 (89.77% |
| | | | | | | | | identity, 94.65% similarity) |
| | | | | | | | | US_8318900_B2-205 (62.10% identity, 74.32% |
| | | | | | | | | similarity) |
| | | | | | | | | APG00672.0 US_2017_0175134_A1-91 (61.57% |
| | | | | | | | | identity, 73.15% similarity) |
| | | | | | | | | APG00045.0 US_2016_0304898_A1-73 (61.09% |
| | | | | | | | | identity, 71.09% similarity) |
| | | | | | | | | APG01742.0 (60.86% identity, 73.87% similarity) |
| | | | | | | | | US_8318900_B2-69 (56.04% identity, 68.00% |
| | | | | | | | | similarity) |
| | | | | | | | | EOO24729.1 (48.35% identity, 62.80% similarity) |
| | | | | | | | | WP_082186915.1 (46.81% identity, 60.79% |
| | | | | | | | | similarity) |
| | | | | | | | | US_8318900_B2-207 (41.80% identity, 51.66% |
| | | | | | | | | similarity) |
| APG04547.0 | 447 | 448 | | | MTX | 5, 10, 15, 20, 25, 30, | 5, 10, 15, 20, 25, 30, | APG07648.0 (96.32% identity, 98.77% similarity) |
| | | | | | | 35, 40, 45, 50, 55, 60, | 35, 40, 45, 50, 55, 60, | OUA87853.1 (95.71% identity, 98.16% similarity) |
| | | | | | | 65, 70, 75, 80, 85, 90, | 65, 70, 75, 80, 85, 90, | APG05852.0 (94.17% identity, 97.55% similarity) |
| | | | | | | 91, 92, 93, 94, 95, 96, | 91, 92, 93, 94, 95, 96, | APG06161.0 (92.02% identity, 96.32% similarity) |
| | | | | | | 97, 98, 99, 100 | 97, 98, 99, 100 | APG04640.0 (90.80% identity, 95.09% similarity) |
| | | | | | | | | OUB84419.1 (89.26% identity, 94.48% similarity) |
| | | | | | | | | OUB72081.1 (85.63% identity, 91.44% similarity) |
| | | | | | | | | EOP79330.1 (85.58% identity, 91.10% similarity) |
| | | | | | | | | APG06841.0 (85.32% identity, 91.74% similarity) |
| | | | | | | | | WP_088048270.1 (80.37% identity, 91.41% |
| | | | | | | | | similarity) |
| APG05852.0 | 449 | 450 | | | MTX | 5, 10, 15, 20, 25, 30, | 5, 10, 15, 20, 25, 30, | OUA87853.1 (95.40% identity, 97.55% similarity) |
| | | | | | | 35, 40, 45, 50, 55, 60, | 35, 40, 45, 50, 55, 60, | APG04547.0 (94.17% identity, 97.55% similarity) |
| | | | | | | 65, 70, 75, 80, 85, 90, | 65, 70, 75, 80, 85, 90, | APG07648.0 (93.87% identity, 98.47% similarity) |
| | | | | | | 91, 92, 93, 94, 95, 96, | 91, 92, 93, 94, 95, 96, | APG06161.0 (92.94% identity, 97.55% similarity) |
| | | | | | | 97, 98, 99, 100 | 97, 98, 99, 100 | APG04640.0 (90.49% identity, 96.32% similarity) |
| | | | | | | | | OUB84419.1 (89.57% identity, 96.32% similarity) |
| | | | | | | | | OUB72081.1 (85.93% identity, 93.27% similarity) |
| | | | | | | | | APG06841.0 (85.63% identity, 93.58% similarity) |
| | | | | | | | | EOP79330.1 (85.28% identity, 91.41% similarity) |
| | | | | | | | | WP_088048270.1 (80.37% identity, 92.33% |
| | | | | | | | | similarity) |
| APG06492.0 | 451 | | | | MTX | 85, 90, 91, 92, 93, 94, | 90, 91, 92, 93, 94, 95, | APG05804.0 (96.36% identity, 97.68% similarity) |
| | | | | | | 95, 96, 97, 98, 99, 100 | 96, 97, 98, 99, 100 | US_9567381_B2-446 (84.26% identity, 89.18% |
| | | | | | | | | similarity) |
| | | | | | | | | APG00450.0 US_2016_0366881_A1-72 (82.95% |
| | | | | | | | | identity, 86.23% similarity) |
| | | | | | | | | APG00501.0 US_2016_0366881_A1-96 (72.46% |
| | | | | | | | | identity, 74.43% similarity) |
| | | | | | | | | US_8461415_B2-57 (42.62% identity, 60.66% |
| | | | | | | | | similarity) |
| | | | | | | | | APG00987.0 US_2016_0366881_A1-223 (41.88% |
| | | | | | | | | identity, 61.04% similarity) |
| | | | | | | | | APG00346.0 US_2016_0366881_A1-24 (41.03% |
| | | | | | | | | identity, 56.41% similarity) |
| | | | | | | | | US_8461415_B2-56 (40.92% identity, 57.10% |
| | | | | | | | | similarity) |
| | | | | | | | | APG00697.0 US_2016_0366881_A1-222 (40.06% |
| | | | | | | | | identity, 55.45% similarity) |
| | | | | | | | | APG00506.0 US_2016_0366881_A1-102 (39.81% |
| | | | | | | | | identity, 60.19% similarity) |
| APG06587.0 | 452 | 453 | | | Cry | 60, 65, 70, 75, 80, 85, | 70, 75, 80, 85, 90, 91, | WP_017762619.1 (91.09% identity, 95.29% |
| | | | | | | 90, 91, 92, 93, 94, 95, | 92, 93, 94, 95, 96, 97, | similarity) |
| | | | | | | 96, 97, 98, 99, 100 | 98, 99, 100 | APG01399.0 (90.92% identity, 95.46% similarity) |
| | | | | | | | | CA_2844913-205 (55.81% identity, 67.94% |
| | | | | | | | | similarity) |
| | | | | | | | | CA_2844913-206 (55.65% identity, 67.77% |
| | | | | | | | | similarity) |
| | | | | | | | | WP_078205743.1 (51.61% identity, 64.47% |
| | | | | | | | | similarity) |
| | | | | | | | | APG00460.0 US_2016_0366881_A1-75 (51.45% |
| | | | | | | | | identity, 64.31% similarity) |
| | | | | | | | | APG00626.0 US_2016_0366881_A1-124 (37.09% |
| | | | | | | | | identity, 50.15% similarity) |
| | | | | | | | | WP_017762581.1 (35.48% identity, 49.76% |
| | | | | | | | | similarity) |
| | | | | | | | | APG00329.0 US_2016_0355842_A1-62 (35.05% |
| | | | | | | | | identity, 48.44% similarity) |
| | | | | | | | | APG06997.0 (34.47% identity, 50.93% similarity) |
| APG07911.0 | 454 | 455 | | | Bin | 90, 91, 92, 93, 94, 95, | 93, 94, 95, 96, 97, 98, | APG04176.0 (90.55% identity, 93.03% similarity) |
| | | | | | | 96, 97, 98, 99, 100 | 99, 100 | CA_2844913-146 (88.45% identity, 92.38% |
| | | | | | | | | similarity) |
| | | | | | | | | APG05715.0 (88.31% identity, 92.04% similarity) |
| | | | | | | | | APG02445.0 (88.31% identity, 91.54% similarity) |
| | | | | | | | | APG00806.0 US_2017_0175134_A1-167 (84.33% |
| | | | | | | | | identity, 90.05% similarity) |
| | | | | | | | | WP_070144216.1 (84.33% identity, 89.55% |
| | | | | | | | | similarity) |
| | | | | | | | | WP_074651503.1 (83.66% identity, 90.35% |
| | | | | | | | | similarity) |
| | | | | | | | | APG00212.0 US_2016_0311864_A1-75 (81.73% |
| | | | | | | | | identity, 87.02% similarity) |
| | | | | | | | | APG00905.0 (79.17% identity, 86.03% similarity) |
| | | | | | | | | APG07818.0 (78.62% identity, 85.75% similarity) |
| APG08051.0 | 456 | 457, 458 | | | MTX | 90, 91, 92, 93, 94, 95, | 95, 96, 97, 98, 99, 100 | APG02782.0 (96.32% identity, 98.16% similarity) |
| | | | | | | 96, 97, 98, 99, 100 | | APG02960.0 (86.81% identity, 94.17% similarity) |
| | | | | | | | | APG04643.0 (86.50% identity, 94.48% similarity) |
| | | | | | | | | APG08085.0 (83.13% identity, 88.96% similarity) |
| | | | | | | | | APG00743.0 (81.29% identity, 88.34% similarity) |
| | | | | | | | | WP_044444098.1 (81.29% identity, 88.34% |
| | | | | | | | | similarity) |
| | | | | | | | | APG02555.0 (81.29% identity, 88.04% similarity) |
| | | | | | | | | WP_090995413.1 (75.84% identity, 84.10% |
| | | | | | | | | similarity) |
| | | | | | | | | WP_060749709.1 (75.54% identity, 85.32% |
| | | | | | | | | similarity) |
| | | | | | | | | APG04485.0 (51.78% identity, 65.38% similarity) |

[0013] i. Classes of Pesticidal Proteins

[0014] The pesticidal proteins provided herein and the nucleotide sequences encoding them are useful in methods for impacting pests. That is, the compositions and methods of the invention find use in agriculture for controlling or killing pests, including pests of many crop plants. The pesticidal proteins provided herein are toxin proteins from bacteria and exhibit activity against certain pests. The pesticidal proteins are from several classes of toxins including Cry, Cyt, BIN, Mtx toxins. See, for example, Table 1 for the specific protein classifications of the various SEQ ID NOS provided herein. In addition, reference is made throughout this disclosure to Pfam database entries. The Pfam database is a database of protein families, each represented by multiple sequence alignments and a profile hidden Markov model. Finn et al. (2014) Nucl. Acid Res. Database Issue 42:D222-D230.

[0015] Bacillus thuringiensis (Bt) is a gram-positive bacterium that produces insecticidal proteins as crystal inclusions during its sporulation phase of growth. The proteinaceous inclusions of Bacillus thuringiensis (Bt) are called crystal proteins or δ-endotoxins (or Cry proteins), which are toxic to members of the class Insecta and other invertebrates. Similarly, Cyt proteins are parasporal inclusion proteins from Bt that exhibits hemolytic (Cytolitic) activity or has obvious sequence similarity to a known Cyt protein. These toxins are highly specific to their target organism, are innocuous to humans, vertebrates, and plants.

[0016] The structure of the Cry toxins reveals five conserved amino acid blocks, concentrated mainly in the center of the domain or at the junction between the domains. The Cry toxin consists of three domains, each with a specific function. Domain I is a seven α-helix bundle in which a central helix is completely surrounded by six outer helices. This domain is implicated in channel formation in the membrane. Domain II appears as a triangular column of three anti-parallel β-sheets, which are similar to antigen—binding regions of immunoglobulins. Domain III contains anti-parallel β-strands in a β sandwich form. The N-terminal part of the toxin protein is responsible for its toxicity and specificity and contains five conserved regions. The C-terminal part is usually highly conserved and probably responsible for crystal formation. See, for example, U.S. Pat. No. 8,878,007.

[0017] Strains of B. thuringiensis show a wide range of specificity against different insect orders (Lepidoptera, Diptera, Coleoptera, Hymenoptera, Homoptera, Phthiraptera or Mallophaga, and Acari) and other invertebrates (Nemathelminthes, Platyhelminthes, and Sarocomastebrates). The cry proteins have been classified into groups based on toxicity to various insect and invertebrate groups. Generally, Cry I demonstrates toxicity to lepidopterans, Cry II to lepidopterans and dipterans, CryIII to coleopterans, Cry IV to dipterans, and Cry V and Cry VI to nematodes. New Cry proteins can be identified and assigned to a Cry group based on amino acid identity. See, for example, Bravo, A. (1997) J. of Bacteriol. 179:2793-2801; Bravo et al. (2013) Microb. Biotechnol. 6:17-26, herein incorporated by reference.

[0018] Over 750 different cry gene sequences have been classified into 73 groups (Cry1-Cry73), with new members of this gene family continuing to be discovered (Crickmore et al. (2014) www.btnomenclature.info/). The cry gene family consists of several phylogentically non-related protein families that may have different modes of action: the family of three-domain Cry toxins, the family of mosquitocidal Cry toxins, the family of the binary-like toxins, and the Cyt family of toxins (Bravo et al., 2005). Some Bt strains produce additional insecticidal toxins, the VIP toxins. See, also, Cohen et al. (2011) J. Mol. Biol. 413:4-814; Crickmore et al. (2014) Bacillus thuringiensis toxin nomenclature, found on the world wide web at lifesci.sussex.ac.uk/home/Neil_Crickmore/Bt/; Crickmore et al. (1988) Microbiol. Mol. Biol. Rev. 62: 807-813; Gill et al. (1992) Ann. Rev. Entomol. 37: 807-636; Goldbert et al. (1997) Appl. Environ. Microbiol. 63:2716-2712; Knowles et al. (1992) Proc. R. Soc. Ser. B. 248: 1-7; Koni et al. (1994) Microbiology 140: 1869-1880; Lailak et al. (2013) Biochem. Biophys. Res. Commun. 435: 216-221; Lopez-Diaz et al. (2013) Environ. Microbiol. 15: 3030-3039; Perez et al. (2007) Cell. Microbiol. 9: 2931-2937; Promdonkoy et al. (2003) Biochem. J. 374: 255-259; Rigden (2009) FEBS Lett. 583: 1555-1560; Schnepf et al. (1998) Microbiol. Mol. Biol. Rev. 62: 775-806; Soberon et al. (2013) Peptides 41: 87-93; Thiery et al. (1998) J. Am. Mosq. Control Assoc. 14: 472-476; Thomas et al. (1983) FEBS Lett. 154: 362-368; Wirth et al. (1997) Proc. Natl. Acad. Sci. U.S.A. 94: 10536-10540; Wirth et al (2005) Appl. Environ. Microbiol. 71: 185-189; and, Zhang et al. (2006) Biosci. Biotechnol. Biochem. 70: 2199-2204; each of which is herein incorporated by reference in their entirety.

[0019] Cyt designates a parasporal crystal inclusion protein from Bacillus thuringiensis with cytolytic activity, or a protein with sequence similarity to a known Cyt protein. (Crickmore et al. (1998) Microbiol. Mol. Biol. Rev. 62: 807-813). The gene is denoted by cyt. These proteins are different in structure and activity from Cry proteins (Gill et al. (1992) Annu. Rev. Entomol. 37: 615-636). The Cyt toxins were first discovered in B. thuringiensis subspecies israelensis (Goldberg et al. (1977) Mosq. News. 37: 355-358). There are 3 Cyt toxin families including 11 holotype toxins in the current nomenclature (Crickmore et al. (2014) Bacillus thuringiensis toxin nomenclature found on the world wide web at lifesci.sussex.ac.uk/home/Neil_CrickmoreSt/). The majority of the B. thuringiensis isolates with cyt genes show activity against dipteran insects (particularly mosquitoes and black flies), but there are also cyt genes that have been described in B. thuringiensis strains targeting lepidopteran or coleopteran insects (Guerchicoff et al. (1997) Appl. Environ. Microbiol. 63: 2716-2721).

[0020] The structure of Cyt2A, solved by X-ray crystallography, shows a single domain where two outer layers of α-helix wrap around a mixed β-sheet. Further available crystal structures of Cyt toxins support a conserved α-β structural model with two α-helix hairpins flanking a β-sheet core containing seven to eight β-strands. (Cohen et al. (2011) J. Mol. Biol. 413: 80 4-814) Mutagenic studies identified β-sheet residues as critical for toxicity, while mutations in the helical domains did not affect toxicity (Adang et al.; Diversity of Bacillus thuringiensis Crystal Toxins and Mechanism of Action. In: T. S. Dhadialla and S. S. Gill, eds, Advances in Insect Physiology, Vol. 47, Oxford: Academic Press, 2014, pp. 39-87.) The representative domain of the Cyt toxin is a δ-endotoxin, Bac_thur_toxin (Pfam PF01338).

[0021] There are multiple proposed models for the mode of action of Cyt toxins, and it is still an area of active investigation. Some Cyt proteins (Cyt1A) have been shown to require the presence of accessory proteins for crystallization. Cyt1A and Cyt2A protoxins are processed by digestive proteases at the same sites in the N- and C-termini to a stable toxin core. Cyt toxins then interact with non-saturated membrane lipids, such as phosphatidylcholine, phosphatidylethanolamine, and sphingomyelin. For Cyt toxins, pore-formation and detergent-like membrane disruption have been proposed as non-exclusive mechanisms; and it is generally accepted that both may occur depending on toxin concentration, with lower concentrations favoring oligomeric pores and higher concentrations leading to membrane breaks. (Butko (2003) Appl. Environ. Microbiol. 69: 2415-2422) In the pore-formation model, the Cyt toxin binds to the cell membrane, inducing the formation of cation-selective channels in the membrane vesicles leading to colloid-osmotic lysis of the cell. (Knowles et al. (1989) FEBS Lett. 244: 259-262; Knowles et al. (1992) Proc. R. Soc. Ser. B. 248: 1-7 and Promdonkoy et al. (2003) Biochem. J. 374: 255-259). In the detergent model, there is a nonspecific aggregation of the toxin on the surface of the lipid bilayer leading to membrane disassembly and cell death. (Butko (2003) supra; Manceva et al. (2005) Biochem. 44: 589-597).

[0022] Multiple studies have shown synergistic activity between Cyt toxins and other B. thuringiensis toxins, particularly the Cry, Bin, and Mtx toxins. This synergism has even been shown to overcome an insect's resistance to the other toxin. (Wirth 1997, Wirth 2005, Thiery 1998, Zhang 2006) The Cyt synergistic effect for Cry toxins is proposed to involve Cyt1A binding to domain II of Cry toxins in solution or on the membrane plane to promote formation of a Cry toxin pre-pore oligomer. Formation of this oligomer is independent of the Cyt oligomerization, binding or insertion. (Lailak 2013, Perez 2007, Lopez-Diaz 2013)

[0023] A number of pesticidal proteins unrelated to the Cry proteins are produced by some strains of B. thuringiensis and B. cereus during vegetative growth (Estruch et al. (1996) Proc Natl Acad Sci USA 93:5389-5394; Warren et al. (1994) WO 94/21795). These vegetative insecticidal proteins, or Vips, do not form parasporal crystal proteins and are apparently secreted from the cell. The Vips are presently excluded from the Cry protein nomenclature because they are not crystal-forming proteins. The term VIP is a misnomer in the sense that some B. thuringiensis Cry proteins are also produced during vegetative growth as well as during the stationary and sporulation phases, most notably Cry3Aa. The location of the Vip genes in the B. thuringiensis genome has been reported to reside on large plasmids that also encode cry genes (Mesrati et al. (2005) FEMS Microbiol. Lett. 244(2):353-8). A web-site for the nomenclature of Bt toxins can be found on the world wide web at lifesci.sussex.ac.uk with the path “/home/Neil_Crickmore/Bt/” and at: “btnomenclature.info/”. See also, Schnepf et al. (1998) Microbiol. Mol. Biol. Rev. 62(3):775-806. Such references are herein incorporated by reference.

[0024] To date four categories of Vips have been identified. Some Vip genes form binary two-component protein complexes; an “A” component is usually the “active” portion, and a “B” component is usually the “binding” portion. (Pfam pfam.xfam.org/family/PF03495). The Vip1 and Vip4 proteins generally contain binary toxin B protein domains. Vip2 proteins generally contain binary toxin A protein domains. The Vip1 and Vip2 proteins are the two components of a binary toxin that exhibits toxicity to coleopterans. Vip1Aa1 and Vip2Aa1 are very active against corn rootworms, particularly Diabrotica virgifera and Diabrotica longicornis (Han et al. (1999) Nat. Struct. Biol. 6:932-936; Warren G W (1997) “Vegetative insecticidal proteins: novel proteins for control of corn pests” In: Carozzi N B, Koziel M (eds) Advances in insect control, the role of transgenic plants; Taylor & Francis Ltd, London, pp 109-21). The membrane-binding 95 kDa Vip1 multimer provides a pathway for the 52 kDa vip2 ADP-ribosylase to enter the cytoplasm of target western corn rootworm cells (Warren (1997) supra). The NAD-dependent ADP-ribosyltransferase Vip2 likely modifies monomeric actin at Arg177 to block polymerization, leading to loss of the actin cytoskeleton and eventual cell death due to the rapid subunit ex-change within actin filaments in vivo (Carlier M. F. (1990) Adv. Biophys. 26:51-73).

[0025] Like Cry toxins, activated Vip3A toxins are pore-forming proteins capable of making stable ion channels in the membrane (Lee et al. (2003) Appl. Environ. Microbiol. 69:4648-4657). Vip3 proteins are active against several major lepidopteran pests (Rang et al. (2005) Appl. Environ. Microbiol. 71(10):6276-6281; Bhalla et al. (2005) FEMS Microbiol. Lett. 243:467-472; Estruch et al. (1998) WO 9844137; Estruch et al. (1996) Proc Natl Acad Sci USA 93:5389-5394; Selvapandiyan et al. (2001) Appl. Environ Microbiol. 67:5855-5858; Yu et al. (1997) Appl. Environ Microbiol. 63:532-536). Vip3A is active against Agrotis ipsilon, Spodoptera frugiperda, Spodoptera exigua, Heliothis virescens, and Helicoverpa zea (Warren et al. (1996) WO 96/10083; Estruch et al. (1996) Proc Natl Acad Sci USA 93:5389-5394) Like Cry toxins, Vip3A proteins must be activated by proteases prior to recognition at the surface of the midgut epithelium of specific membrane proteins different from those recognized by Cry toxins.

[0026] The MTX family of toxin proteins is characterized by the presence of a conserved domain, ETX_MTX2 (pfam 03318). Members of this family share sequence homology with the mosquitocidal toxins Mtx2 and Mtx3 from Bacillus sphaericus, as well as with the epsilon toxin ETX from Clostridium perfringens (Cole et al. (2004) Nat. Struct. Mol. Biol. 11: 797-8; Thanabalu et al. (1996) Gene 170:85-9). The MTX-like proteins are structurally distinct from the three-domain Cry toxins, as they have an elongated and predominately β-sheet-based structure. However, similar to the three-domain toxins, the MTX-like proteins are thought to form pores in the membranes of target cells (Adang et al. (2014) supra). Unlike the three-domain Cry proteins, the MTX-like proteins are much smaller in length, ranging from 267 amino acids (Cry23) to 340 amino acids (Cry15A.

[0027] To date, only 15 proteins belonging to the family of MTX-like toxins have been assigned Cry names, making this a relatively small class compared to the three-domain Cry family (Crickmore et al. (2014) supra; Adang et al. (2014) supra). The members of the MTX-like toxin family include Cry15, Cry23, Cry33, Cry38, Cry45, Cry46, Cry51, Cry60A, Cry60B, and Cry64. This family exhibits a range of insecticidal activity, including activity against insect pests of the Lepidopteran and Coleopteran orders. Some members of this family may form binary partnerships with other proteins, which may or may not be required for insecticidal activity.

[0028] Cry15 is a 34 kDA protein that was identified in Bacillus thuringiensis serovar thompsoni HD542; it occurs naturally in a crystal together with an unrelated protein of approximately 40 kDa. The gene encoding Cry15 and its partner protein are arranged together in an operon. Cry15 alone has been shown to have activity against lepidopteran insect pests including Manduca sexta, Cydia pomonella, and Pieris rapae, with the presence of the 40 kDA protein having been shown to increase activity of Cry15 only against C. pomonella (Brown K. and Whiteley H. (1992) J. Bacteriol. 174:549-557; Naimov et al. (2008) Appl. Environ. Microbiol. 74:7145-7151). Further studies are needed to elucidate the function of the partner protein of Cry15. Similarly, Cry23 is a 29 kDA protein that has been shown to have activity against the coleopteran pests Tribolium castaneum and Popillia japonica together with its partner protein Cry37 (Donovan et al. (2000) U.S. Pat. No. 6,063,756).

[0029] New members of the MTX-like family are continuing to be identified. An ETX_MTX toxin gene was recently identified in the genome of Bacillus thuringiensis serovar tolworthi strain Na205-3. This strain was found to be toxic against the lepidpoteran pest Helicoverpa armigera, and it also contained homologs of Cry1, Cry11, Vip1, Vip2, and Vip3 (Palma et al. (2014) Genome Announc. 2(2): e00187-14. Published online Mar. 13, 2014 at doi: 10.1128/genomeA.00187-14; PMCID: PMC3953196). Because the MTX-like proteins have a unique domain structure relative to the three-domain Cry proteins, they are believed to possess a unique mode of action, thereby making them a valuable tool in insect control and the fight against insect resistance.

[0030] Bacterial cells produce large numbers of toxins with diverse specificity against host and non-host organisms. Large families of binary toxins have been identified in numerous bacterial families, including toxins that have activity against insect pests. (Poopathi and Abidha (2010) J. Physiol. Path. 1(3): 22-38). Lysinibacillus sphaericus (Ls), formerly Bacillus sphaericus, (Ahmed et al. (2007) Int. J. Syst. Evol. Microbiol. 57:1117-1125) is well-known as an insect biocontrol strain. Ls produces several insecticidal proteins, including the highly potent binary complex BinA/BinB. This binary complex forms a parasporal crystal in Ls cells and has strong and specific activity against dipteran insects, specifically mosquitos. In some areas, insect resistance to existing Ls mosquitocidal strains has been reported. The discovery of new binary toxins with different target specificity or the ability to overcome insect resistance is of significant interest.

[0031] The Ls binary insecticidal protein complex contains two major polypeptides, a 42 kDa polypeptide and a 51 kDa polypepdide, designated BinA and BinB, respectively (Ahmed et al. (2007) supra). The two polypeptides act synergistically to confer toxicity to their targets. Mode of action involves binding of the proteins to receptors in the larval midgut. In some cases, the proteins are modified by protease digestion in the larval gut to produce activated forms. The BinB component is thought to be involved in binding, while the BinA component confers toxicity (Nielsen-LeRoux et al. (2001) Appl. Environ. Microbiol. 67(11):5049-5054). When cloned and expressed separately, the BinA component is toxic to mosquito larvae, while the BinB component is not. However, co-administration of the proteins markedly increases toxicity (Nielsen-LeRoux et al. (2001) supra).

[0032] A small number of Bin protein homologs have been described from bacterial sources. Priest et al. (1997) Appl. Environ. Microbiol. 63(4):1195-1198 describe a hybridization effort to identify new Ls strains, although most of the genes they identified encoded proteins identical to the known BinA/BinB proteins. The BinA protein contains a defined conserved domain known as the Toxin 10 superfamily domain. This toxin domain was originally defined by its presence in BinA and BinB. The two proteins both have the domain, although the sequence similarity between BinA and BinB is limited in this region (<40%). The Cry49Aa protein, which also has insecticidal activity, also has this domain (described below).

[0033] The Cry48Aa/Cry49Aa binary toxin of Ls has the ability to kill Culex quinquefasciatus mosquito larvae. These proteins are in a protein structural class that has some similarity to the Cry protein complex of Bacillus thuringiensis (Bt), a well-known insecticidal protein family. The Cry34/Cry35 binary toxin of Bt is also known to kill insects, including Western corn rootworm, a significant pest of corn. Cry34, of which several variants have been identified, is a small (14 kDa) polypeptide, while Cry35 (also encoded by several variants) is a 44 kDa polypeptide. These proteins have some sequence homology with the BinA/BinB protein group and are thought to be evolutionarily related (Ellis et al. (2002) Appl. Environ. Microbiol. 68(3):1137-1145).

[0034] Phosphoinositide phospholipase C proteins (PI-PLC; also phosphotidylinositol phospholipase C) are members of the broader group of phospholipase C proteins. Many of these proteins play important roles in signal transduction as part of normal cell physiology. Several important bacterial toxins also contain domains with similarity to these proteins (Titball, R. W. (1993) Microbiological Reviews. 57(2):347-366). Importantly, these proteins are implicated in signal amplification during intoxication of insect cells by Bt Cry proteins (Valaitis, A. P. (2008) Insect Biochemistry and Molecular Biology. 38: 611-618).

[0035] The PI-PLC toxin class occurs in Bacillus isolates, commonly seen in co-occurrence with homologs to other described toxin classes, such as Binary Toxins. This class of sequences has homology to phosphatidylinositol phosphodiesterases (also referred to as phosphatidylinositol-specific phospholipase C—PI-PLC). The crystal structure and its active site were solved for B. cereus PI-PLC by Heinz et al (Heinz, et. al., (1995) The EMBO Journal. 14(16): 3855-3863). The roles of the B. cereus PI-PLC active site amino acid residues in catalysis and substrate binding were investigated by Gässier et al using site-directed mutagenesis, kinetics, and crystal structure analysis (Gässier, et. al., (1997) Biochemistry. 36(42):12802-13).

[0036] These PI-PLC toxin proteins contain a PLC-like phosphodiesterase, TIM beta/alpha-barrel domain (IPR017946) and/or a Phospholipase C, phosphatidylinositol-specific, X domain (IPR000909) (also referred to as the PI-PLC X-box domain). We have also seen proteins with these domains in combination with other typical Bacillus protein toxin domains. This list includes most commonly a lectin domain (IPR000772), a sugar-binding domain that can be present in one or more copies and is thought to bind cell membranes, as well as the Insecticidal crystal toxin (IPR008872) (also referred to as Toxin10 or P42), which is the defining domain of the Binary Toxin.

[0037] Previously, toxins of this PI-PLC class were defined in U.S. Pat. No. 8,318,900 B2 SEQ ID NOs 30 (DNA) and 79 (amino acid), in U.S. Patent Publication No. 20110263488A1 SEQ ID NOs 8 (DNA) and 9 (amino acid), and in U.S. Pat. No. 8,461,421B2 SEQ ID NOs 3 (DNA) and 63 (amino acid).

[0038] Provided herein are pesticidal proteins from these classes of toxins. The pesticidal proteins are classified by their structure, homology to known toxins and/or their pesticidal specificity.

[0039] ii. Variants and Fragments of Pesticidal Proteins and Polynucleotides Encoding the Same

[0040] Pesticidal proteins or polypeptides of the invention include those set forth in SEQ ID NOs: 1, 2, 3, 4, 5, 6, 7, 8, 9, 10, 11, 12, 13, 14, 15, 16, 17, 18, 19, 20, 21, 22, 23, 24, 25, 26, 27, 28, 29, 30, 31, 32, 33, 34, 35, 36, 37, 38, 39, 40, 41, 42, 43, 44, 45, 46, 47, 48, 49, 50, 51, 52, 53, 54, 55, 56, 57, 58, 59, 60, 61, 62, 63, 64, 65, 66, 67, 68, 69, 70, 71, 72, 73, 74, 75, 76, 77, 78, 79, 80, 81, 82, 83, 84, 85, 86, 87, 88, 89, 90, 91, 92, 93, 94, 95, 96, 97, 98, 99, 100, 101, 102, 103, 104, 105, 106, 107, 108, 109, 110, 111, 112, 113, 114, 115, 116, 117, 118, 119, 120, 121, 122, 123, 124, 125, 126, 127, 128, 129, 130, 131, 132, 133, 134, 135, 136, 137, 138, 139, 140, 141, 142, 143, 144, 145, 146, 147, 148, 149, 150, 151, 152, 153, 154, 155, 156, 157, 158, 159, 160, 161, 162, 163, 164, 165, 166, 167, 168, 169, 170, 171, 172, 173, 174, 175, 176, 177, 178, 179, 180, 181, 182, 183, 184, 185, 186, 187, 188, 189, 190, 191, 192, 193, 194, 195, 196, 197, 198, 199, 200, 201, 202, 203, 204, 205, 206, 207, 208, 209, 210, 211, 212, 213, 214, 215, 216, 217, 218, 219, 220, 221, 222, 223, 224, 225, 226, 227, 228, 229, 230, 231, 232, 233, 234, 235, 236, 237, 238, 239, 240, 241, 242, 243, 244, 245, 246, 247, 248, 249, 250, 251, 252, 253, 254, 255, 256, 257, 258, 259, 260, 261, 262, 263, 264, 265, 266, 267, 268, 269, 270, 271, 272, 273, 274, 275, 276, 277, 278, 279, 280, 281, 282, 283, 284, 285, 286, 287, 288, 289, 290, 291, 292, 293, 294, 295, 296, 297, 298, 299, 300, 301, 302, 303, 304, 305, 306, 307, 308, 309, 310, 311, 312, 313, 314, 315, 316, 317, 318, 319, 320, 321, 322, 323, 324, 325, 326, 327, 328, 329, 330, 331, 332, 333, 334, 335, 336, 337, 338, 339, 340, 341, 342, 343, 344, 345, 346, 347, 348, 349, 350, 351, 352, 353, 354, 355, 356, 357, 358, 359, 360, 361, 362, 363, 364, 365, 366, 367, 368, 369, 370, 371, 372, 373, 374, 375, 376, 377, 378, 379, 380, 381, 382, 383, 384, 385, 386, 387, 388, 389, 390, 391, 392, 393, 394, 395, 396, 397, 398, 399, 400, 401, 402, 403, 404, 405, 406, 407, 408, 409, 410, 411, 412, 413, 414, 415, 416, 417, 418, 419, 420, 421, 422, 423, 424, 425, 426, 427, 428, 429, 430, 431, 432, 433, 434, 435, 436, 437, 438, 439, 440, 441, 442, 443, 444, 445, 446, 447, 448, 449, 450, 451, 452, 453, 454, 455, 456, 457, and/or 458 and fragments and variants thereof. By “pesticidal toxin” or “pesticidal protein” or “pesticidal polypeptide” is intended a toxin or protein or polypeptide that has activity against one or more pests, including, insects, fungi, nematodes, and the like such that the pest is killed or controlled.

[0041] An “isolated” or “purified” polypeptide or protein, or biologically active portion thereof, is substantially or essentially free from components that normally accompany or interact with the polypeptide or protein as found in its naturally occurring environment. Thus, an isolated or purified polypeptide or protein is substantially free of other cellular material, or culture medium when produced by recombinant techniques, or substantially free of chemical precursors or other chemicals when chemically synthesized. A protein that is substantially free of cellular material includes preparations of protein having less than about 30%, 20%, 10%, 5%, or 1% (by dry weight) of contaminating protein. When the protein of the invention or biologically active portion thereof is recombinantly produced, optimally culture medium represents less than about 30%, 20%, 10%, 5%, or 1% (by dry weight) of chemical precursors or non-protein-of-interest chemicals.

[0042] The term “fragment” refers to a portion of a polypeptide sequence of the invention. “Fragments” or “biologically active portions” include polypeptides comprising a sufficient number of contiguous amino acid residues to retain the biological activity, i.e., have pesticidal activity. Fragments of the pesticidal proteins include those that are shorter than the full-length sequences, either due to the use of an alternate downstream start site, or due to processing that produces a shorter protein having pesticidal activity. Processing may occur in the organism the protein is expressed in, or in the pest after ingestion of the protein. Examples of fragments of the proteins can be found in Table 1. A biologically active portion of a pesticidal protein can be a polypeptide that is, for example, 10, 25, 50, 100, 150, 200, 250 or more amino acids in length of any one of SEQ ID NO: 1, 2, 3, 4, 5, 6, 7, 8, 9, 10, 11, 12, 13, 14, 15, 16, 17, 18, 19, 20, 21, 22, 23, 24, 25, 26, 27, 28, 29, 30, 31, 32, 33, 34, 35, 36, 37, 38, 39, 40, 41, 42, 43, 44, 45, 46, 47, 48, 49, 50, 51, 52, 53, 54, 55, 56, 57, 58, 59, 60, 61, 62, 63, 64, 65, 66, 67, 68, 69, 70, 71, 72, 73, 74, 75, 76, 77, 78, 79, 80, 81, 82, 83, 84, 85, 86, 87, 88, 89, 90, 91, 92, 93, 94, 95, 96, 97, 98, 99, 100, 101, 102, 103, 104, 105, 106, 107, 108, 109, 110, 111, 112, 113, 114, 115, 116, 117, 118, 119, 120, 121, 122, 123, 124, 125, 126, 127, 128, 129, 130, 131, 132, 133, 134, 135, 136, 137, 138, 139, 140, 141, 142, 143, 144, 145, 146, 147, 148, 149, 150, 151, 152, 153, 154, 155, 156, 157, 158, 159, 160, 161, 162, 163, 164, 165, 166, 167, 168, 169, 170, 171, 172, 173, 174, 175, 176, 177, 178, 179, 180, 181, 182, 183, 184, 185, 186, 187, 188, 189, 190, 191, 192, 193, 194, 195, 196, 197, 198, 199, 200, 201, 202, 203, 204, 205, 206, 207, 208, 209, 210, 211, 212, 213, 214, 215, 216, 217, 218, 219, 220, 221, 222, 223, 224, 225, 226, 227, 228, 229, 230, 231, 232, 233, 234, 235, 236, 237, 238, 239, 240, 241, 242, 243, 244, 245, 246, 247, 248, 249, 250, 251, 252, 253, 254, 255, 256, 257, 258, 259, 260, 261, 262, 263, 264, 265, 266, 267, 268, 269, 270, 271, 272, 273, 274, 275, 276, 277, 278, 279, 280, 281, 282, 283, 284, 285, 286, 287, 288, 289, 290, 291, 292, 293, 294, 295, 296, 297, 298, 299, 300, 301, 302, 303, 304, 305, 306, 307, 308, 309, 310, 311, 312, 313, 314, 315, 316, 317, 318, 319, 320, 321, 322, 323, 324, 325, 326, 327, 328, 329, 330, 331, 332, 333, 334, 335, 336, 337, 338, 339, 340, 341, 342, 343, 344, 345, 346, 347, 348, 349, 350, 351, 352, 353, 354, 355, 356, 357, 358, 359, 360, 361, 362, 363, 364, 365, 366, 367, 368, 369, 370, 371, 372, 373, 374, 375, 376, 377, 378, 379, 380, 381, 382, 383, 384, 385, 386, 387, 388, 389, 390, 391, 392, 393, 394, 395, 396, 397, 398, 399, 400, 401, 402, 403, 404, 405, 406, 407, 408, 409, 410, 411, 412, 413, 414, 415, 416, 417, 418, 419, 420, 421, 422, 423, 424, 425, 426, 427, 428, 429, 430, 431, 432, 433, 434, 435, 436, 437, 438, 439, 440, 441, 442, 443, 444, 445, 446, 447, 448, 449, 450, 451, 452, 453, 454, 455, 456, 457, and/or 458. Such biologically active portions can be prepared by recombinant techniques and evaluated for pesticidal activity. As used here, a fragment comprises at least 8 contiguous amino acids of SEQ ID NOs: 1, 2, 3, 4, 5, 6, 7, 8, 9, 10, 11, 12, 13, 14, 15, 16, 17, 18, 19, 20, 21, 22, 23, 24, 25, 26, 27, 28, 29, 30, 31, 32, 33, 34, 35, 36, 37, 38, 39, 40, 41, 42, 43, 44, 45, 46, 47, 48, 49, 50, 51, 52, 53, 54, 55, 56, 57, 58, 59, 60, 61, 62, 63, 64, 65, 66, 67, 68, 69, 70, 71, 72, 73, 74, 75, 76, 77, 78, 79, 80, 81, 82, 83, 84, 85, 86, 87, 88, 89, 90, 91, 92, 93, 94, 95, 96, 97, 98, 99, 100, 101, 102, 103, 104, 105, 106, 107, 108, 109, 110, 111, 112, 113, 114, 115, 116, 117, 118, 119, 120, 121, 122, 123, 124, 125, 126, 127, 128, 129, 130, 131, 132, 133, 134, 135, 136, 137, 138, 139, 140, 141, 142, 143, 144, 145, 146, 147, 148, 149, 150, 151, 152, 153, 154, 155, 156, 157, 158, 159, 160, 161, 162, 163, 164, 165, 166, 167, 168, 169, 170, 171, 172, 173, 174, 175, 176, 177, 178, 179, 180, 181, 182, 183, 184, 185, 186, 187, 188, 189, 190, 191, 192, 193, 194, 195, 196, 197, 198, 199, 200, 201, 202, 203, 204, 205, 206, 207, 208, 209, 210, 211, 212, 213, 214, 215, 216, 217, 218, 219, 220, 221, 222, 223, 224, 225, 226, 227, 228, 229, 230, 231, 232, 233, 234, 235, 236, 237, 238, 239, 240, 241, 242, 243, 244, 245, 246, 247, 248, 249, 250, 251, 252, 253, 254, 255, 256, 257, 258, 259, 260, 261, 262, 263, 264, 265, 266, 267, 268, 269, 270, 271, 272, 273, 274, 275, 276, 277, 278, 279, 280, 281, 282, 283, 284, 285, 286, 287, 288, 289, 290, 291, 292, 293, 294, 295, 296, 297, 298, 299, 300, 301, 302, 303, 304, 305, 306, 307, 308, 309, 310, 311, 312, 313, 314, 315, 316, 317, 318, 319, 320, 321, 322, 323, 324, 325, 326, 327, 328, 329, 330, 331, 332, 333, 334, 335, 336, 337, 338, 339, 340, 341, 342, 343, 344, 345, 346, 347, 348, 349, 350, 351, 352, 353, 354, 355, 356, 357, 358, 359, 360, 361, 362, 363, 364, 365, 366, 367, 368, 369, 370, 371, 372, 373, 374, 375, 376, 377, 378, 379, 380, 381, 382, 383, 384, 385, 386, 387, 388, 389, 390, 391, 392, 393, 394, 395, 396, 397, 398, 399, 400, 401, 402, 403, 404, 405, 406, 407, 408, 409, 410, 411, 412, 413, 414, 415, 416, 417, 418, 419, 420, 421, 422, 423, 424, 425, 426, 427, 428, 429, 430, 431, 432, 433, 434, 435, 436, 437, 438, 439, 440, 441, 442, 443, 444, 445, 446, 447, 448, 449, 450, 451, 452, 453, 454, 455, 456, 457, and/or 458.

[0043] Bacterial genes, including those encoding the pesticidal proteins disclosed herein, quite often possess multiple methionine initiation codons in proximity to the start of the open reading frame. Often, translation initiation at one or more of these start codons will lead to generation of a functional protein. These start codons can include ATG codons. However, bacteria such as Bacillus sp. also recognize the codon GTG as a start codon, and proteins that initiate translation at GTG codons contain a methionine at the first amino acid. On rare occasions, translation in bacterial systems can initiate at a TTG codon, though in this event the TTG encodes a methionine. Furthermore, it is not often determined a priori which of these codons are used naturally in the bacterium. Thus, it is understood that use of one of the alternate methionine codons may also lead to generation of pesticidal proteins. These pesticidal proteins are encompassed in the present invention and may be used in the methods disclosed herein. It will be understood that, when expressed in plants, it will be necessary to alter the alternate start codon to ATG for proper translation.

[0044] In various embodiments the pesticidal proteins provided herein include amino acid sequences deduced from the full-length nucleotide sequences and amino acid sequences that are shorter than the full-length sequences due to the use of an alternate downstream start site. Thus, the nucleotide sequence of the invention and/or vectors, host cells, and plants comprising the nucleotide sequence of the invention (and methods of making and using the nucleotide sequence of the invention) may comprise a nucleotide sequence encoding an alternate start site.

[0045] It is recognized that modifications may be made to the pesticidal polypeptides provided herein creating variant proteins. Changes designed by man may be introduced through the application of site-directed mutagenesis techniques. Alternatively, native, as yet-unknown or as yet unidentified polynucleotides and/or polypeptides structurally and/or functionally-related to the sequences disclosed herein may also be identified that fall within the scope of the present invention. Conservative amino acid substitutions may be made in nonconserved regions that do not alter the function of the pesticidal proteins. Alternatively, modifications may be made that improve the activity of the toxin. Modification of Cry toxins by domain III swapping has resulted in some cases in hybrid toxins with improved toxicities against certain insect species. Thus, domain III swapping could be an effective strategy to improve toxicity of Cry toxins or to create novel hybrid toxins with toxicity against pests that show no susceptibility to the parental Cry toxins. Site-directed mutagenesis of domain II loop sequences may result in new toxins with increased insecticidal activity. Domain II loop regions are key binding regions of initial Cry toxins that are suitable targets for the mutagenesis and selection of Cry toxins with improved insecticidal properties. Domain I of the Cry toxin may be modified to introduce protease cleavage sites to improve activity against certain pests. Strategies for shuffling the three different domains among large numbers of cry genes and high through output bioassay screening methods may provide novel Cry toxins with improved or novel toxicities.

[0046] As indicated, fragments and variants of the polypeptides disclosed herein will retain pesticidal activity. Pesticidal activity comprises the ability of the composition to achieve an observable effect diminishing the occurrence or an activity of the target pest, including for example, bringing about death of at least one pest, or a noticeable reduction in pest growth, feeding, or normal physiological development. Such decreases in numbers, pest growth, feeding or normal development can comprise any statistically significant decrease, including, for example a decrease of about 5%, 10%, 15%, 20%, 25%, 30%, 35%, 40%, 45%, 50%, 55%, 60%, 65%, 70%, 75%, 85%, 90%, 95% or greater. The pesticidal activity against one or more of the various pests provided herein, including, for example, pesticidal activity against Coleoptera, Diptera, Hymenoptera, Lepidoptera, Mallophaga, Homoptera, Hemiptera, Orthroptera, Nematodes, Thysanoptera, Dermaptera, Isoptera, Anoplura, Siphonaptera, Trichoptera, etc., or any other pest described herein. It is recognized that the pesticidal activity may be different or improved relative to the activity of the native protein, or it may be unchanged, so long as pesticidal activity is retained. Methods for measuring pesticidal activity are provide elsewhere herein. See also, Czapla and Lang (1990) J. Econ. Entomol. 83:2480-2485; Andrews et al. (1988) Biochem. J. 252:199-206; Marrone et al. (1985) J. of Economic Entomology 78:290-293; and U.S. Pat. No. 5,743,477, all of which are herein incorporated by reference in their entirety.

[0047] By “variants” is intended polypeptides having an amino acid sequence that is at least about 60%, about 65%, about 70%, about 75%, about 80%, about 85%, about 86%, about 87%, about 88%, about 89%, about 90%, about 91%, about 92%, about 93%, about 94%, about 95%, about 96%, about 97%, about 98% or about 99% identical to the amino acid sequence of any of SEQ lD NOs: 1, 2, 3, 4, 5, 6, 7, 8, 9, 10, 11, 12, 13, 14, 15, 16, 17, 18, 19, 20, 21, 22, 23, 24, 25, 26, 27, 28, 29, 30, 31, 32, 33, 34, 35, 36, 37, 38, 39, 40, 41, 42, 43, 44, 45, 46, 47, 48, 49, 50, 51, 52, 53, 54, 55, 56, 57, 58, 59, 60, 61, 62, 63, 64, 65, 66, 67, 68, 69, 70, 71, 72, 73, 74, 75, 76, 77, 78, 79, 80, 81, 82, 83, 84, 85, 86, 87, 88, 89, 90, 91, 92, 93, 94, 95, 96, 97, 98, 99, 100, 101, 102, 103, 104, 105, 106, 107, 108, 109, 110, 111, 112, 113, 114, 115, 116, 117, 118, 119, 120, 121, 122, 123, 124, 125, 126, 127, 128, 129, 130, 131, 132, 133, 134, 135, 136, 137, 138, 139, 140, 141, 142, 143, 144, 145, 146, 147, 148, 149, 150, 151, 152, 153, 154, 155, 156, 157, 158, 159, 160, 161, 162, 163, 164, 165, 166, 167, 168, 169, 170, 171, 172, 173, 174, 175, 176, 177, 178, 179, 180, 181, 182, 183, 184, 185, 186, 187, 188, 189, 190, 191, 192, 193, 194, 195, 196, 197, 198, 199, 200, 201, 202, 203, 204, 205, 206, 207, 208, 209, 210, 211, 212, 213, 214, 215, 216, 217, 218, 219, 220, 221, 222, 223, 224, 225, 226, 227, 228, 229, 230, 231, 232, 233, 234, 235, 236, 237, 238, 239, 240, 241, 242, 243, 244, 245, 246, 247, 248, 249, 250, 251, 252, 253, 254, 255, 256, 257, 258, 259, 260, 261, 262, 263, 264, 265, 266, 267, 268, 269, 270, 271, 272, 273, 274, 275, 276, 277, 278, 279, 280, 281, 282, 283, 284, 285, 286, 287, 288, 289, 290, 291, 292, 293, 294, 295, 296, 297, 298, 299, 300, 301, 302, 303, 304, 305, 306, 307, 308, 309, 310, 311, 312, 313, 314, 315, 316, 317, 318, 319, 320, 321, 322, 323, 324, 325, 326, 327, 328, 329, 330, 331, 332, 333, 334, 335, 336, 337, 338, 339, 340, 341, 342, 343, 344, 345, 346, 347, 348, 349, 350, 351, 352, 353, 354, 355, 356, 357, 358, 359, 360, 361, 362, 363, 364, 365, 366, 367, 368, 369, 370, 371, 372, 373, 374, 375, 376, 377, 378, 379, 380, 381, 382, 383, 384, 385, 386, 387, 388, 389, 390, 391, 392, 393, 394, 395, 396, 397, 398, 399, 400, 401, 402, 403, 404, 405, 406, 407, 408, 409, 410, 411, 412, 413, 414, 415, 416, 417, 418, 419, 420, 421, 422, 423, 424, 425, 426, 427, 428, 429, 430, 431, 432, 433, 434, 435, 436, 437, 438, 439, 440, 441, 442, 443, 444, 445, 446, 447, 448, 449, 450, 451, 452, 453, 454, 455, 456, 457, and/or 458 and retain pesticidal activity. Note, Table 1 provides non-limiting examples of variant polypeptides (and polynucleotide encoding the same) for each of SEQ ID NOS: 1, 2, 3, 4, 5, 6, 7, 8, 9, 10, 11, 12, 13, 14, 15, 16, 17, 18, 19, 20, 21, 22, 23, 24, 25, 26, 27, 28, 29, 30, 31, 32, 33, 34, 35, 36, 37, 38, 39, 40, 41, 42, 43, 44, 45, 46, 47, 48, 49, 50, 51, 52, 53, 54, 55, 56, 57, 58, 59, 60, 61, 62, 63, 64, 65, 66, 67, 68, 69, 70, 71, 72, 73, 74, 75, 76, 77, 78, 79, 80, 81, 82, 83, 84, 85, 86, 87, 88, 89, 90, 91, 92, 93, 94, 95, 96, 97, 98, 99, 100, 101, 102, 103, 104, 105, 106, 107, 108, 109, 110, 111, 112, 113, 114, 115, 116, 117, 118, 119, 120, 121, 122, 123, 124, 125, 126, 127, 128, 129, 130, 131, 132, 133, 134, 135, 136, 137, 138, 139, 140, 141, 142, 143, 144, 145, 146, 147, 148, 149, 150, 151, 152, 153, 154, 155, 156, 157, 158, 159, 160, 161, 162, 163, 164, 165, 166, 167, 168, 169, 170, 171, 172, 173, 174, 175, 176, 177, 178, 179, 180, 181, 182, 183, 184, 185, 186, 187, 188, 189, 190, 191, 192, 193, 194, 195, 196, 197, 198, 199, 200, 201, 202, 203, 204, 205, 206, 207, 208, 209, 210, 211, 212, 213, 214, 215, 216, 217, 218, 219, 220, 221, 222, 223, 224, 225, 226, 227, 228, 229, 230, 231, 232, 233, 234, 235, 236, 237, 238, 239, 240, 241, 242, 243, 244, 245, 246, 247, 248, 249, 250, 251, 252, 253, 254, 255, 256, 257, 258, 259, 260, 261, 262, 263, 264, 265, 266, 267, 268, 269, 270, 271, 272, 273, 274, 275, 276, 277, 278, 279, 280, 281, 282, 283, 284, 285, 286, 287, 288, 289, 290, 291, 292, 293, 294, 295, 296, 297, 298, 299, 300, 301, 302, 303, 304, 305, 306, 307, 308, 309, 310, 311, 312, 313, 314, 315, 316, 317, 318, 319, 320, 321, 322, 323, 324, 325, 326, 327, 328, 329, 330, 331, 332, 333, 334, 335, 336, 337, 338, 339, 340, 341, 342, 343, 344, 345, 346, 347, 348, 349, 350, 351, 352, 353, 354, 355, 356, 357, 358, 359, 360, 361, 362, 363, 364, 365, 366, 367, 368, 369, 370, 371, 372, 373, 374, 375, 376, 377, 378, 379, 380, 381, 382, 383, 384, 385, 386, 387, 388, 389, 390, 391, 392, 393, 394, 395, 396, 397, 398, 399, 400, 401, 402, 403, 404, 405, 406, 407, 408, 409, 410, 411, 412, 413, 414, 415, 416, 417, 418, 419, 420, 421, 422, 423, 424, 425, 426, 427, 428, 429, 430, 431, 432, 433, 434, 435, 436, 437, 438, 439, 440, 441, 442, 443, 444, 445, 446, 447, 448, 449, 450, 451, 452, 453, 454, 455, 456, 457, and/or 458. A biologically active variant of a pesticidal polypeptide of the invention may differ by as few as about 1-15 amino acid residues, as few as about 1-10, such as about 6-10, as few as 5, as few as 4, as few as 3, as few as 2, or as few as 1 amino acid residue. In specific embodiments, the polypeptides can comprise an N-terminal or a C-terminal truncation, which can comprise at least a deletion of 10, 15, 20, 25, 30, 35, 40, 45, 50 amino acids or more from either the N or C terminal of the polypeptide.

[0048] Table 2 provides protein domains found in SEQ ID NOs: 1-458 based on PFAM data. Both the domain description and the positions within a given SEQ ID NO are provided in Table 2. In specific embodiments, the active variant comprising any one of SEQ ID NOs: 1-458 can comprise at least 70%, 75%, 76%, 77%, 78%, 79%, 80%, 81%, 82%, 83%, 84%, 85%, 86%, 87%, 88%, 89%, 90%, 91%, 92%, 93%, 94%, 95%, 96%, 97%, 98%, or 99% sequence identity to any one of SEQ ID NOs: 1-458 and further comprises at least one of the conserved domain set forth in Table 2. For example, in one embodiment, the active variant will comprise at least 70%, 75%, 76%, 77%, 78%, 79%, 80%, 81%, 82%, 83%, 84%, 85%, 86%, 87%, 88%, 89%, 90%, 91%, 92%, 93%, 94%, 95%, 96%, 97%, 98%, or 99% sequence identity to SEQ ID NO:1, and further comprises the native amino acids at positions 23-202.

TABLE 2
Summary of PFAM domains in each of SEQ ID NOs: 1-458

| | | | | | Domain | |
|---|---|---|---|---|---|---|
| | Seq | Modification | PFAM | Domain | Positions | |
| APG ID | ID | Type | Domain | Description | Start | End |
| APG00929 | 1 | | PF06101 | DUF946 | 23 | 202 |
| APG00954 | 2 | | PF03318 | ETX MTX2 | 29 | 252 |
| APG01044 | 3 | | no PFAM | | | |
| | | | domains | | | |
| APG01044 modified | 4 | Signal | PF03318 | ETX MTX2 | 6 | 288 |
| (APG01044.1) | | peptide | | | | |
| | | removed | | | | |
| APG01087 | 5 | | no PFAM | | | |
| | | | domains | | | |
| APG01087 modified | 6 | Signal | no PFAM | | | |
| (APG01087.1) | | peptide | domains | | | |
| | | removed | | | | |
| APG01231 | 7 | | PF03318 | ETX MTX2 | 65 | 258 |
| APG01231 modified | 8 | Signal | PF03318 | ETX MTX2 | 77 | 232 |
| (APG01231.1) | | peptide | | | | |
| | | removed | | | | |
| APG01309 | 9 | | PF01338 | Bac thur toxin | 10 | 204 |
| APG01329 | 10 | | PF03945 | Endotoxin N | 98 | 306 |
| | | | PF00555 | Endotoxin M | 343 | 533 |
| | | | PF03944 | Endotoxin C | 543 | 678 |
| APG01329 modified | 11 | Alternate | PF03945 | Endotoxin N | 75 | 283 |
| (APG01329.2) | | start and | PF00555 | Endotoxin M | 320 | 510 |
| | | 3′ | PF03944 | Endotoxin C | 520 | 654 |
| | | Truncation | | | | |
| APG01329 modified | 12 | Alternate | PF03945 | Endotoxin N | 75 | 283 |
| (APG01329.1) | | start | PF00555 | Endotoxin M | 320 | 510 |
| | | | PF03944 | Endotoxin C | 520 | 655 |
| APG01387 | 13 | | PF03945 | Endotoxin N | 81 | 295 |
| | | | PF00555 | Endotoxin M | 332 | 518 |
| | | | PF03944 | Endotoxin C | 528 | 662 |
| APG01387 modified | 14 | Alternate | PF03945 | Endotoxin N | 76 | 290 |
| (APG01387.1) | | start | PF00555 | Endotoxin M | 327 | 513 |
| | | | PF03944 | Endotoxin C | 523 | 657 |
| APG01387 modified | 15 | Alternate | PF03945 | Endotoxin N | 77 | 290 |
| (APG01387.2) | | start and | PF00555 | Endotoxin M | 327 | 513 |
| | | 3′ | PF03944 | Endotoxin C | 523 | 656 |
| | | Truncation | | | | |
| APG01399 | 16 | | PF03945 | Endotoxin N | 112 | 316 |
| APG01399 modified | 17 | Signal | PF03945 | Endotoxin N | 74 | 278 |
| (APG01399.1) | | peptide | | | | |
| | | removed | | | | |
| APG01459 | 18 | | PF03945 | Endotoxin N | 105 | 337 |
| | | | PF03944 | Endotoxin C | 532 | 669 |
| APG01459 modified | 19 | Signal | PF03945 | Endotoxin N | 75 | 307 |
| (APG01459.1) | | peptide | PF03944 | Endotoxin C | 502 | 639 |
| | | removed | | | | |
| | | and 3′ | | | | |
| | | Truncation | | | | |
| APG01474 | 20 | | PF07691 | PA14 | 51 | 179 |
| | | | PF03495 | Binary toxB | 219 | 633 |
| APG01474 modified | 21 | Alternate | PF07691 | PA14 | 49 | 177 |
| (APG01474.1) | | start | PF03495 | Binary toxB | 217 | 631 |
| APG01506 | 22 | | PF03318 | ETX MTX2 | 27 | 250 |
| APG01517 | 23 | | no PFAM | | | |
| | | | domains | | | |
| APG01517 modified | 24 | Signal | no PFAM | | | |
| (APG01517.1) | | peptide | domains | | | |
| | | removed | | | | |
| APG01522 | 25 | | PF06355 | Aegerolysin | 5 | 117 |
| APG01522 modified | 26 | Alternate | PF06355 | Aegerolysin | 3 | 115 |
| (APG01522.1) | | start | | | | |
| APG01644 | 27 | | PF03945 | Endotoxin N | 99 | 322 |
| | | | PF03944 | Endotoxin C | 512 | 642 |
| | | | PF01473 | CW binding 1 | 694 | 711 |
| | | | PF01473 | CW binding 1 | 723 | 740 |
| | | | PF01473 | CW binding 1 | 781 | 800 |
| | | | PF01473 | CW binding 1 | 802 | 819 |
| APG01644 modified | 28 | Signal | PF03945 | Endotoxin N | 69 | 292 |
| (APG01644.1) | | peptide | PF03944 | Endotoxin C | 482 | 612 |
| | | removed | | | | |
| | | and 3′ | | | | |
| | | Truncation | | | | |
| APG01676 | 29 | | PF03318 | ETX MTX2 | 38 | 324 |
| APG01676 modified | 30 | Signal | PF03318 | ETX MTX2 | 9 | 293 |
| (APG01676.1) | | peptide | | | | |
| | | removed | | | | |
| APG01718 | 31 | | PF03945 | Endotoxin N | 99 | 305 |
| APG01718 modified | 32 | Alternate | PF03945 | Endotoxin N | 78 | 284 |
| (APG01718.1) | | start | | | | |
| APG01742 | 33 | | PF03945 | Endotoxin N | 101 | 332 |
| | | | PF03944 | Endotoxin C | 526 | 661 |
| | | | PF01473 | CW binding 1 | 684 | 701 |
| | | | PF01473 | CW binding 1 | 771 | 788 |
| | | | PF01473 | CW binding 1 | 800 | 817 |
| APG01742 modified | 34 | Signal | PF03945 | Endotoxin N | 71 | 302 |
| (APG01742.1) | | peptide | PF03944 | Endotoxin C | 496 | 630 |
| | | removed | | | | |
| | | and 3′ | | | | |
| | | Truncation | | | | |
| APG01772 | 35 | | PF03945 | Endotoxin N | 83 | 282 |
| APG01780 | 36 | | PF03945 | Endotoxin N | 74 | 326 |
| | | | PF00555 | Endotoxin M | 337 | 516 |
| | | | PF03944 | Endotoxin C | 532 | 671 |
| APG01780 modified | 37 | Alternate | PF03945 | Endotoxin N | 68 | 279 |
| (APG01780.1) | | start and | PF00555 | Endotoxin M | 331 | 510 |
| | | 3′ | PF03944 | Endotoxin C | 526 | 664 |
| | | Truncation | | | | |
| APG01790 | 38 | | PF05431 | Toxin 10 | 230 | 425 |
| APG01790 modified | 39 | Alternate | PF05431 | Toxin 10 | 195 | 390 |
| (APG01790.1) | | start | | | | |
| APG01849 | 40 | | no PFAM | | | |
| | | | domains | | | |
| APG01849 modified | 41 | Alternate | no PFAM | | | |
| (APG01849.2) | | start | domains | | | |
| APG01849 modified | 42 | Signal | no PFAM | | | |
| (APG01849.1) | | peptide | domains | | | |
| | | removed | | | | |
| APG01915 | 43 | | PF03945 | Endotoxin N | 84 | 338 |
| | | | PF00555 | Endotoxin M | 349 | 528 |
| | | | PF03944 | Endotoxin C | 544 | 686 |
| APG01915 modified | 44 | 3′ | PF03945 | Endotoxin N | 84 | 338 |
| (APG01915.1) | | Truncation | PF00555 | Endotoxin M | 349 | 528 |
| | | | PF03944 | Endotoxin C | 544 | 685 |
| APG01937 | 45 | | PF06355 | Aegerolysin | 120 | 206 |
| APG01996 | 46 | | PF03318 | ETX MTX2 | 8 | 263 |
| APG02168 | 47 | | no PFAM | | | |
| | | | domains | | | |
| APG02215 | 48 | | PF06101 | DUF946 | 1 | 233 |
| APG02215 modified | 49 | Alternate | PF06101 | DUF946 | 2 | 214 |
| (APG02215.1) | | start | | | | |
| APG02262 | 50 | | no PFAM | | | |
| | | | domains | | | |
| APG02291 | 51 | | PF06355 | Aegerolysin | 3 | 115 |
| APG02293 | 52 | | no PFAM | | | |
| | | | domains | | | |
| APG02293 modified | 53 | Signal | no PFAM | | | |
| (APG02293.1) | | peptide | domains | | | |
| | | removed | | | | |
| APG02408 | 54 | | no PFAM | | | |
| | | | domains | | | |
| APG02408 modified | 55 | Signal | no PFAM | | | |
| (APG02408.2) | | peptide | domains | | | |
| | | removed | | | | |
| APG02408 modified | 56 | Alternate | no PFAM | | | |
| (APG02408.1) | | start | domains | | | |
| APG02445 | 57 | | PF05431 | Toxin 10 | 202 | 396 |
| APG02445 modified | 58 | Signal | PF05431 | Toxin 10 | 173 | 367 |
| (APG02445.1) | | peptide | | | | |
| | | removed | | | | |
| APG02477 | 59 | | no PFAM | | | |
| | | | domains | | | |
| APG02477 modified | 60 | Alternate | no PFAM | | | |
| (APG02477.1) | | start | domains | | | |
| APG02638 | 61 | | PF03318 | ETX MTX2 | 27 | 252 |
| APG02782 | 62 | | no PFAM | | | |
| | | | domains | | | |
| APG02782 modified | 63 | Signal | no PFAM | | | |
| (APG02782.2) | | peptide | domains | | | |
| | 63 | removed | | | | |
| APG02782 modified | 64 | Alternate | no PFAM | | | |
| (APG02782.1) | | start | domains | | | |
| APG02798 | 65 | | PF03318 | ETX MTX2 | 38 | 272 |
| APG02798 modified | 66 | Signal | PF03318 | ETX MTX2 | 21 | 255 |
| (APG02798.1) | | peptide | | | | |
| | | removed | | | | |
| APG02809 | 67 | | no PFAM | | | |
| | | | domains | | | |
| APG02912 | 68 | | PF01823 | MACPF | 132 | 339 |
| APG02912 modified | 69 | Alternate | PF01823 | MACPF | 121 | 328 |
| (APG02912.1) | | start | | | | |
| APG03015 | 70 | | PF03318 | ETX MTX2 | 86 | 311 |
| APG03015 modified | 71 | Signal | PF03318 | ETX MTX2 | 54 | 280 |
| (APG03015.1) | | peptide | | | | |
| | | removed | | | | |
| APG03053 | 72 | | PF03318 | ETX MTX2 | 18 | 287 |
| APG03053 modified | 73 | Alternate | PF03318 | ETX MTX2 | 18 | 287 |
| (APG03053.1) | | start | | | | |
| APG03072 | 74 | | no PFAM | | | |
| | | | domains | | | |
| APG03072 modified | 75 | Signal | no PFAM | | | |
| (APG03072.1) | | peptide | domains | | | |
| | | removed | | | | |
| APG03080 | 76 | | PF01338 | Bac thur toxin | 9 | 233 |
| APG03227 | 77 | | no PFAM | | | |
| | | | domains | | | |
| APG03227 modified | 78 | Signal | no PFAM | | | |
| (APG03227.1) | | peptide | domains | | | |
| | | removed | | | | |
| APG03249 | 79 | | PF03318 | ETX MTX2 | 40 | 256 |
| APG03249 modified | 80 | Alternate | PF03318 | ETX MTX2 | 36 | 251 |
| (APG03249.1) | | start | | | | |
| APG03299 | 81 | no PFAM | | | | |
| | | domains | | | | |
| APG03309 | 82 | | PF01338 | Bac thur toxin | 2 | 194 |
| APG03309 modified | 83 | Alternate | PF01338 | Bac thur toxin | 1 | 194 |
| (APG03309.1) | | start | | | | |
| APG03379 | 84 | | PF03318 | ETX MTX2 | 21 | 252 |
| APG03519 | 85 | | PF03945 | Endotoxin N | 64 | 302 |
| | | | PF00555 | Endotoxin M | 310 | 496 |
| | | | PF03944 | Endotoxin C | 506 | 645 |
| APG03519 modified | 86 | Alternate | PF03945 | Endotoxin N | 64 | 302 |
| (APG03519.1) | | start | PF00555 | Endotoxin M | 310 | 496 |
| | | | PF03944 | Endotoxin C | 506 | 645 |
| APG03519 modified | 87 | Alternate | PF03945 | Endotoxin N | 64 | 302 |
| (APG03519.2) | | start and | PF00555 | Endotoxin M | 310 | 496 |
| | | 3′ | PF03944 | Endotoxin C | 506 | 644 |
| | | Truncation | | | | |
| APG03569 | 88 | | PF03945 | Endotoxin N | 66 | 312 |
| APG03604 | 89 | | PF03318 | ETX MTX2 | 40 | 260 |
| APG03699 | 90 | | PF03945 | Endotoxin N | 95 | 309 |
| APG03699 modified | 91 | Signal | PF03945 | Endotoxin N | 60 | 275 |
| (APG03699.1) | | peptide | | | | |
| | | removed | | | | |
| APG03722 | 92 | | PF03945 | Endotoxin N | 182 | 392 |
| | | | PF00555 | Endotoxin M | 469 | 693 |
| | | | PF03944 | Endotoxin C | 703 | 840 |
| APG03722 modified | 93 | Alternate | PF03945 | Endotoxin N | 101 | 311 |
| (APG03722.1) | | start | PF00555 | Endotoxin M | 388 | 612 |
| | | | PF03944 | Endotoxin C | 622 | 759 |
| APG03722 modified | 94 | Alternate | PF03945 | Endotoxin N | 101 | 311 |
| (APG03722.2) | | start and | PF00555 | Endotoxin M | 388 | 612 |
| | | 3′ | PF03944 | Endotoxin C | 622 | 758 |
| | | Truncation | | | | |
| APG03726 | 95 | | PF01823 | MACPF | 140 | 354 |
| APG03726 modified | 96 | Alternate | PF01823 | MACPF | 119 | 333 |
| (APG03726.1) | | start | | | | |
| APG03732 | 97 | | no PFAM | | | |
| | | | domains | | | |
| APG03732 modified | 98 | Signal | no PFAM | | | |
| (APG03732.1) | | peptide | domains | | | |
| | | removed | | | | |
| APG03746 | 99 | | PF03318 | ETX MTX2 | 28 | 288 |
| APG03746 modified | 100 | Signal | PF03318 | ETX MTX2 | 9 | 260 |
| (APG03746.2) | | peptide | | | | |
| | | removed | | | | |
| APG03746 modified | 101 | Alternate | PF03318 | ETX MTX2 | 26 | 286 |
| (APG03746.1) | | start | | | | |
| APG03786 | 102 | | PF03945 | Endotoxin N | 56 | 296 |
| | | | PF00555 | Endotoxin M | 304 | 519 |
| | | | PF03944 | Endotoxin C | 529 | 657 |
| APG03786 modified | 103 | Alternate | PF03945 | Endotoxin N | 53 | 293 |
| (APG03786.1) | | start | PF00555 | Endotoxin M | 301 | 516 |
| | | | PF03944 | Endotoxin C | 526 | 654 |
| PG03848 | 104 | | PF03318 | ETX MTX2 | 71 | 328 |
| APG03848 modified | 105 | Signal | PF03318 | ETX MTX2 | 38 | 298 |
| (APG03848.1) | | peptide | | | | |
| | | removed | | | | |
| APG03901 | 106 | | PF03945 | Endotoxin N | 92 | 283 |
| APG03901 modified | 107 | Signal | PF03945 | Endotoxin N | 1 | 176 |
| (APG03901.2) | | peptide | | | | |
| | | removed | | | | |
| APG03901 modified | 108 | Alternate | PF03945 | Endotoxin N | 13 | 204 |
| (APG03901.1) | | start | | | | |
| APG03947 | 109 | | PF03318 | ETX MTX2 | 116 | 346 |
| APG03947 modified | 110 | Signal | PF03318 | ETX MTX2 | 71 | 301 |
| (APG03947.2) | | peptide | | | | |
| | | removed | | | | |
| APG03947 modified | 111 | Alternate | PF03318 | ETX MTX2 | 104 | 334 |
| (APG03947.1) | | start | | | | |
| APG04013 | 112 | | no PFAM | | | |
| | | | domains | | | |
| APG04013 modified | 113 | Alternate | no PFAM | | | |
| (APG04013.1) | | start | domains | | | |
| APG04076 | 114 | | PF03318 | ETX MTX2 | 28 | 256 |
| APG04076 modified | 115 | Alternate | PF03318 | ETX MTX2 | 21 | 249 |
| (APG04076.1) | | start | | | | |
| APG04176 | 116 | | PF05431 | Toxin 10 | 203 | 397 |
| APG04176 modified | 117 | Signal | PF05431 | Toxin 10 | 174 | 368 |
| (APG04176.1) | | peptide | | | | |
| | | removed | | | | |
| APG04332 | 118 | | PF03945 | Endotoxin N | 112 | 325 |
| | | | PF00555 | Endotoxin M | 333 | 529 |
| | | | PF03944 | Endotoxin C | 539 | 676 |
| APG04332 modified | 119 | Alternate | PF03945 | Endotoxin N | 96 | 309 |
| (APG04332.1) | | start and | PF00555 | Endotoxin M | 317 | 513 |
| | | 3′ | PF03944 | Endotoxin C | 523 | 659 |
| | | Truncation | | | | |
| APG04350 | 120 | | PF03945 | Endotoxin N | 76 | 302 |
| | | | PF00555 | Endotoxin M | 310 | 520 |
| | | | PF03944 | Endotoxin C | 530 | 669 |
| APG04350 modified | 121 | Alternate | PF03945 | Endotoxin N | 70 | 296 |
| (APG04350.1) | | start and | PF00555 | Endotoxin M | 304 | 514 |
| | | 3′ | PF03944 | Endotoxin C | 524 | 662 |
| | | Truncation | | | | |
| APG04365 | 122 | | PF07691 | PA14 | 77 | 205 |
| | | | PF03495 | Binary toxB | 245 | 658 |
| APG04365 modified | 123 | Alternate | PF07691 | PA14 | 74 | 202 |
| (APG04365.1) | | start | PF03495 | Binary toxB | 242 | 655 |
| APG04418 | 124 | | PF16403 | DUF5011 | 282 | 355 |
| APG04418 modified | 125 | Signal | PF16403 | DUF5011 | 238 | 311 |
| (APG04418.2) | | peptide | | | | |
| | | removed | | | | |
| APG04418 modified | 126 | Alternate | PF16403 | DUF5011 | 263 | 336 |
| (APG04418.1) | | start | | | | |
| APG04431 | 127 | | PF03318 | ETX MTX2 | 145 | 374 |
| APG04431 modified | 128 | Signal | PF03318 | ETX MTX2 | 100 | 329 |
| (APG04431.1) | | peptide | | | | |
| | | removed | | | | |
| APG04460 | 129 | | PF03945 | Endotoxin N | 1 | 175 |
| | | | PF00555 | Endotoxin M | 183 | 400 |
| | | | PF03944 | Endotoxin C | 410 | 548 |
| APG04460 modified | 130 | 3′ | PF03945 | Endotoxin N | 1 | 175 |
| (APG04460.1) | | Truncation | PF00555 | Endotoxin M | 183 | 400 |
| | | | PF03944 | Endotoxin C | 410 | 547 |
| APG04460 Split-Cry C- | 131 | | no PFAM | | | |
| terminus (APG01900) | | | domains | | | |
| APG04477 | 132 | | PF03318 | ETX MTX2 | 69 | 306 |
| APG04477 modified | 133 | Signal | PF03318 | ETX MTX2 | 37 | 273 |
| (APG04477.1) | | peptide | | | | |
| | | removed | | | | |
| APG04597 | 134 | | PF01823 | MACPF | 311 | 525 |
| APG04597 modified | 135 | Alternate | PF01823 | MACPF | 119 | 333 |
| (APG04597.1) | | start | | | | |
| APG04598 | 136 | | PF03318 | ETX MTX2 | 39 | 278 |
| APG04640 | 137 | | no PFAM | | | |
| | | | domains | | | |
| APG04640 modified | 138 | Signal | no PFAM | | | |
| (APG04640.1) | | peptide | domains | | | |
| | | removed | | | | |
| APG04682 | 139 | | PF03945 | Endotoxin N | 239 | 340 |
| | | | PF03944 | Endotoxin C | 544 | 678 |
| APG04682 modified | 140 | 3′ | PF03945 | Endotoxin N | 238 | 340 |
| (APG04682.1) | | Truncation | PF03944 | Endotoxin C | 544 | 677 |
| APG04720 | 141 | | PF03318 | ETX MTX2 | 30 | 253 |
| APG04720 modified | 142 | Alternate | PF03318 | ETX MTX2 | 27 | 250 |
| (APG04720.1) | | start | | | | |
| APG04725 | 143 | | PF01338 | Bac thur toxin | 16 | 234 |
| APG04725 modified | 144 | Alternate | PF01338 | Bac thur toxin | 16 | 234 |
| (APG04725.1) | | start | | | | |
| APG04804 | 145 | | no PFAM | | | |
| | | | domains | | | |
| APG04804 modified | 146 | Signal | no PFAM | | | |
| (APG04804.1) | | peptide | domains | | | |
| | | removed | | | | |
| APG04807 | 147 | | PF03318 | ETX MTX2 | 46 | 261 |
| APG04807 modified | 148 | Signal | PF03318 | ETX MTX2 | 15 | 229 |
| (APG04807.1) | | peptide | | | | |
| | | removed | | | | |
| APG04931 | 149 | | PF07691 | PA14 | 48 | 177 |
| | | | PF03495 | Binary toxB | 215 | 633 |
| | | | PF09259 | Fve | 860 | 961 |
| APG04931 modified | 150 | Signal | PF07691 | PA14 | 21 | 150 |
| (APG04931.1) | | peptide | PF03495 | Binary toxB | 188 | 606 |
| | | removed | PF09259 | Fve | 833 | 934 |
| APG04978 | 151 | | PF03318 | ETX MTX2 | 24 | 248 |
| APG05025 | 152 | | PF12495 | Vip3A N | 12 | 188 |
| APG05025 modified | 153 | Alternate | PF12495 | Vip3A N | 9 | 185 |
| (APG05025.1) | | start | | | | |
| APG05034 | 154 | | PF03945 | Endotoxin N | 71 | 307 |
| | | | PF03944 | Endotoxin C | 512 | 656 |
| APG05034 modified | 155 | Alternate | PF03945 | Endotoxin N | 11 | 247 |
| (APG05034.2) | | start and | PF03944 | Endotoxin C | 452 | 595 |
| | | 3′ | | | | |
| | | Truncation | | | | |
| APG05034 modified | 156 | 3′ | PF03945 | Endotoxin N | 71 | 307 |
| (APG05034.1) | | Truncation | PF03944 | Endotoxin C | 512 | 655 |
| APG05045 | 157 | | PF03318 | ETX MTX2 | 65 | 264 |
| APG05045 modified | 158 | Alternate | PF03318 | ETX MTX2 | 67 | 260 |
| (APG05045.1) | | start | | | | |
| APG05084 | 159 | | no PFAM | | | |
| | | | domains | | | |
| APG05084 modified | 160 | Signal | no PFAM | | | |
| (APG05084.1) | | peptide | domains | | | |
| | | removed | | | | |
| APG05328 | 161 | | PF03318 | ETX MTX2 | 23 | 250 |
| APG05370 | 162 | | PF03945 | Endotoxin N | 74 | 299 |
| | | | PF00555 | Endotoxin M | 307 | 522 |
| | | | PF03944 | Endotoxin C | 532 | 666 |
| APG05370 modified | 163 | 3′ | PF03945 | Endotoxin N | 73 | 299 |
| (APG05370.1) | | Truncation | PF00555 | Endotoxin M | 307 | 522 |
| | | | PF03944 | Endotoxin C | 532 | 665 |
| APG05384 | 164 | | no PFAM | | | |
| | | | domains | | | |
| APG05384 modified | 165 | Alternate | no PFAM | | | |
| (APG05384.1) | | start | domains | | | |
| APG05384 modified | 166 | Signal | no PFAM | | | |
| (APG05384.2) | | peptide | domains | | | |
| | | removed | | | | |
| APG05506 | 167 | | PF03318 | ETX MTX2 | 76 | 336 |
| APG05615 | 168 | | PF03318 | ETX MTX2 | 67 | 310 |
| APG05615 modified | 169 | Alternate | PF03318 | ETX MTX2 | 43 | 286 |
| (APG05615.1) | | start | | | | |
| APG05619 | 170 | | PF05431 | Toxin 10 | 162 | 357 |
| APG05651 | 171 | | no PFAM | | | |
| | | | domains | | | |
| APG05651 modified | 172 | Signal | no PFAM | | | |
| (APG05651.1) | | peptide | domains | | | |
| | | removed | | | | |
| APG05653 | 173 | | no PFAM | | | |
| | | | domains | | | |
| APG05653 modified | 174 | Signal | no PFAM | | | |
| (APG05653.1) | | peptide | domains | | | |
| | | removed | | | | |
| APG05658 | 175 | | PF03318 | ETX MTX2 | 98 | 359 |
| APG05658 modified | 176 | Signal | PF03318 | ETX MTX2 | 69 | 330 |
| (APG05658.1) | | peptide | | | | |
| | | removed | | | | |
| APG05715 | 177 | | PF05431 | Toxin 10 | 202 | 396 |
| APG05715 modified | 178 | Signal | PF05431 | Toxin 10 | 173 | 367 |
| (APG05715.1) | | peptide | | | | |
| | | removed | | | | |
| APG05804 | 179 | | PF03318 | ETX MTX2 | 20 | 273 |
| APG05810 | 180 | | PF03945 | Endotoxin N | 78 | 295 |
| | | | PF00555 | Endotoxin M | 303 | 522 |
| | | | PF03944 | Endotoxin C | 532 | 665 |
| APG05810 modified | 181 | 3′ | PF03945 | Endotoxin N | 78 | 295 |
| (APG05810.1) | | Truncation | PF00555 | Endotoxin M | 303 | 522 |
| | | | PF03944 | Endotoxin C | 532 | 664 |
| APG05924 | 182 | | PF07691 | PA14 | 49 | 185 |
| | | | PF03495 | Binary toxB | 222 | 635 |
| APG05924 modified | 183 | Alternate | PF07691 | PA14 | 49 | 185 |
| (APG05924.1) | | start | PF03495 | Binary toxB | 222 | 635 |
| APG05930 | 184 | | PF03945 | Endotoxin N | 68 | 299 |
| | | | PF00555 | Endotoxin M | 307 | 525 |
| | | | PF03944 | Endotoxin C | 536 | 688 |
| APG05930 modified | 185 | Alternate | PF03945 | Endotoxin N | 68 | 299 |
| (APG05930.1) | | start and | PF00555 | Endotoxin M | 307 | 525 |
| | | 3′ | PF03944 | Endotoxin C | 536 | 687 |
| | | Truncation | | | | |
| APG05978 | 186 | | PF03945 | Endotoxin N | 23 | 193 |
| APG05978 modified | 187 | Alternate | PF03945 | Endotoxin N | 15 | 185 |
| (APG05978.1) | | start | | | | |
| APG06051 | 188 | | PF14200 | RicinB lectin 2 | 42 | 120 |
| | | | PF05431 | Toxin 10 | 101 | 296 |
| APG06161 | 189 | | no PFAM | | | |
| | | | domains | | | |
| APG06161 modified | 190 | Signal | no PFAM | | | |
| (APG06161.1) | | peptide | domains | | | |
| | | removed | | | | |
| APG06176 | 191 | | no PFAM | | | |
| | | | domains | | | |
| APG06176 modified | 192 | Alternate | no PFAM | | | |
| (APG06176.1) | | start | domains | | | |
| APG06253 | 193 | | PF03945 | Endotoxin N | 81 | 335 |
| | | | PF00555 | Endotoxin M | 346 | 527 |
| | | | PF03944 | Endotoxin C | 542 | 684 |
| APG06253 modified | 194 | Alternate | PF03945 | Endotoxin N | 68 | 322 |
| (APG06253.1) | | start and | PF00555 | Endotoxin M | 333 | 514 |
| | | 3′ | PF03944 | Endotoxin C | 529 | 670 |
| | | Truncation | | | | |
| APG06364 | 195 | | no PFAM | | | |
| | | | domains | | | |
| APG06364 modified | 196 | Signal | no PFAM | | | |
| (APG06364.1) | | peptide | domains | | | |
| | | removed | | | | |
| APG06372 | 197 | | PF03318 | ETX MTX2 | 118 | 351 |
| APG06372 modified | 198 | Signal | PF03318 | ETX MTX2 | 90 | 342 |
| (APG06372.2) | | peptide | | | | |
| | | removed | | | | |
| APG06372 modified | 199 | Alternate | PF03318 | ETX MTX2 | 118 | 351 |
| (APG06372.1) | | start | | | | |
| APG06428 | 200 | | PF03945 | Endotoxin N | 25 | 252 |
| | | | PF00555 | Endotoxin M | 260 | 465 |
| | | | PF03944 | Endotoxin C | 475 | 629 |
| APG06428 Split-Cry C- | 201 | | no PFAM | | | |
| terminus (APG02204) | | | domains | | | |
| APG06431 | 202 | | PF03318 | ETX MTX2 | 73 | 314 |
| APG06431 modified | 203 | Signal | PF03318 | ETX MTX2 | 20 | 284 |
| (APG06431.1) | | peptide | | | | |
| | | removed | | | | |
| APG06630 | 204 | | PF03945 | Endotoxin N | 64 | 290 |
| | | | PF00555 | Endotoxin M | 298 | 493 |
| | | | PF03944 | Endotoxin C | 505 | 646 |
| APG06630 modified | 205 | Alternate | PF03945 | Endotoxin N | 62 | 288 |
| (APG06630.2) | | start and | PF00555 | Endotoxin M | 296 | 492 |
| | | 3′ | PF03944 | Endotoxin C | 503 | 643 |
| | | Truncation | | | | |
| APG06630 modified | 206 | Alternate | PF03945 | Endotoxin N | 62 | 288 |
| (APG06630.1) | | start | PF00555 | Endotoxin M | 296 | 491 |
| | | | PF03944 | Endotoxin C | 503 | 644 |
| APG06650 | 207 | | PF03945 | Endotoxin N | 85 | 318 |
| | | | PF00555 | Endotoxin M | 329 | 489 |
| | | | PF03944 | Endotoxin C | 529 | 666 |
| APG06650 modified | 208 | 3′ | PF03945 | Endotoxin N | 85 | 318 |
| (APG06650.1) | | Truncation | PF00555 | Endotoxin M | 329 | 490 |
| | | | PF03944 | Endotoxin C | 529 | 665 |
| APG06690 | 209 | | PF03318 | ETX MTX2 | 26 | 246 |
| APG06739 | 210 | | PF03945 | Endotoxin N | 74 | 298 |
| | | | PF00555 | Endotoxin M | 306 | 517 |
| | | | PF03944 | Endotoxin C | 527 | 662 |
| APG06739 modified | 211 | Alternate | PF03945 | Endotoxin N | 67 | 291 |
| (APG06739.2) | | start and | PF00555 | Endotoxin M | 299 | 510 |
| | | 3′ | PF03944 | Endotoxin C | 520 | 654 |
| | | Truncation | | | | |
| APG06739 modified | 212 | Alternate | PF03945 | Endotoxin N | 67 | 291 |
| (APG06739.1) | | start | PF00555 | Endotoxin M | 299 | 510 |
| | | | PF03944 | Endotoxin C | 520 | 655 |
| APG06739 CryBP1 | 213 | | PF07029 | CryBP1 | 44 | 194 |
| (APG01238) | | | | | | |
| APG06768 | 214 | | PF03318 | ETX MTX2 | 62 | 276 |
| APG06784 | 215 | | no PFAM | | | |
| | | | domains | | | |
| APG06784 modified | 216 | Signal | no PFAM | | | |
| (APG06784.1) | | peptide | domains | | | |
| | | removed | | | | |
| APG06880 | 217 | | PF03318 | ETX MTX2 | 32 | 298 |
| APG06880 modified | 218 | Alternate | PF03318 | ETX MTX2 | 5 | 269 |
| (APG06880.1) | | start | | | | |
| APG06912 | 219 | | no PFAM | | | |
| | | | domains | | | |
| APG06912 modified | 220 | Alternate | no PFAM | | | |
| (APG06912.1) | | start | domains | | | |
| APG06912 modified | 221 | Signal | no PFAM | | | |
| (APG06912.2) | | peptide | domains | | | |
| | | removed | | | | |
| APG06921 | 222 | | PF03945 | Endotoxin N | 78 | 290 |
| | | | PF00555 | Endotoxin M | 298 | 513 |
| | | | PF03944 | Endotoxin C | 523 | 661 |
| APG06938 | 223 | | PF14200 | RicinB lectin 2 | 43 | 132 |
| APG06942 | 224 | | PF03945 | Endotoxin N | 79 | 303 |
| | | | PF00555 | Endotoxin M | 311 | 524 |
| | | | PF03944 | Endotoxin C | 534 | 674 |
| APG06942 modified | 225 | Alternate | PF03945 | Endotoxin N | 72 | 297 |
| (APG06942.2) | | start and | PF00555 | Endotoxin M | 305 | 518 |
| | | 3′ | PF03944 | Endotoxin C | 528 | 667 |
| | | Truncation | | | | |
| APG06942 modified | 226 | Alternate | PF03945 | Endotoxin N | 73 | 297 |
| (APG06942.1) | | start | PF00555 | Endotoxin M | 305 | 518 |
| | | | PF03944 | Endotoxin C | 528 | 668 |
| APG06942 CryBP1 | 227 | | PF07029 | CryBP1 | 40 | 190 |
| (APG01239) | | | | | | |
| APG06995 | 228 | | PF03945 | Endotoxin N | 55 | 255 |
| | | | PF01473 | CW binding 1 | 346 | 361 |
| | | | PF01473 | CW binding 1 | 401 | 414 |
| | | | PF01473 | CW binding 1 | 485 | 498 |
| APG07016 | 229 | | PF03945 | Endotoxin N | 67 | 288 |
| | | | PF00555 | Endotoxin M | 353 | 473 |
| | | | PF03944 | Endotoxin C | 605 | 746 |
| APG07016 modified | 230 | Alternate | PF03945 | Endotoxin N | 65 | 286 |
| (APG07016.1) | | start | PF00555 | Endotoxin M | 351 | 471 |
| | | | PF03944 | Endotoxin C | 603 | 744 |
| APG07016 modified | 231 | Alternate | PF03945 | Endotoxin N | 65 | 286 |
| (APG07016.2) | | start and | PF00555 | Endotoxin M | 351 | 474 |
| | | 3′ | PF03944 | Endotoxin C | 603 | 743 |
| | | Truncation | | | | |
| APG07036 | 232 | | no PFAM | | | |
| | | | domains | | | |
| APG07036 modified | 233 | Alternate | no PFAM | | | |
| (APG07036.1) | | start | domains | | | |
| APG07037 | 234 | | PF03945 | Endotoxin N | 70 | 282 |
| | | | PF00555 | Endotoxin M | 290 | 487 |
| | | | PF03944 | Endotoxin C | 497 | 633 |
| APG07037 modified | 235 | Alternate | PF03945 | Endotoxin N | 70 | 282 |
| (APG07037.1) | | start and | PF00555 | Endotoxin M | 290 | 487 |
| | | 3′ | PF03944 | Endotoxin C | 497 | 632 |
| | | Truncation | | | | |
| APG07058 | 236 | | PF03318 | ETX MTX2 | 37 | 245 |
| APG07058 modified | 237 | Signal | PF03318 | ETX MTX2 | 15 | 217 |
| (APG07058.1) | | peptide | | | | |
| | | removed | | | | |
| APG07100 | 238 | | PF03945 | Endotoxin N | 79 | 295 |
| | | | PF00555 | Endotoxin M | 303 | 521 |
| | | | PF03944 | Endotoxin C | 531 | 678 |
| APG07100 modified | 239 | 3′ | PF03945 | Endotoxin N | 79 | 295 |
| (APG07100.1) | | Truncation | PF00555 | Endotoxin M | 303 | 521 |
| | | | PF03944 | Endotoxin C | 531 | 677 |
| APG07396 | 240 | | PF03318 | ETX MTX2 | 26 | 274 |
| APG07518 | 241 | | PF06355 | Aegerolysin | 85 | 167 |
| APG07518 modified | 242 | Signal | PF06355 | Aegerolysin | 56 | 138 |
| (APG07518.1) | | peptide | | | | |
| | | removed | | | | |
| APG07559 | 243 | | no PFAM | | | |
| | | | domains | | | |
| APG07559 modified | 244 | Alternate | no PFAM | | | |
| (APG07559.2) | | start | domains | | | |
| APG07559 modified | 245 | Alternate | no PFAM | | | |
| (APG07559.1) | | start | domains | | | |
| APG07655 | 246 | | PF03318 | ETX MTX2 | 25 | 250 |
| APG07672 | 247 | | PF03318 | ETX MTX2 | 74 | 308 |
| APG07672 modified | 248 | Alternate | PF03318 | ETX MTX2 | 67 | 301 |
| (APG07672.1) | | start | | | | |
| APG07672 modified | 249 | Signal | PF03318 | ETX MTX2 | 39 | 274 |
| (APG07672.2) | | peptide | | | | |
| | | removed | | | | |
| APG07731 | 250 | | no PFAM | | | |
| | | | domains | | | |
| APG07731 modified | 251 | Signal | no PFAM | | | |
| (APG07731.1) | | peptide | domains | | | |
| | | removed | | | | |
| APG07748 | 252 | | PF03318 | ETX MTX2 | 151 | 384 |
| APG07748 modified | 253 | Signal | PF03318 | ETX MTX2 | 91 | 329 |
| (APG07748.2) | | peptide | | | | |
| | | removed | | | | |
| APG07748 modified | 254 | Alternate | PF03318 | ETX MTX2 | 119 | 352 |
| (APG07748.1) | | start | | | | |
| APG07783 | 255 | | PF03318 | ETX MTX2 | 59 | 320 |
| APG07783 modified | 256 | Signal | PF03318 | ETX MTX2 | 27 | 289 |
| (APG07783.1) | | peptide | | | | |
| | | removed | | | | |
| APG07787 | 257 | | PF14200 | RicinB lectin 2 | 48 | 136 |
| APG07790 | 258 | | PF07691 | PA14 | 43 | 170 |
| | | | PF03495 | Binary tox6 | 211 | 624 |
| | | | PF09259 | Fve | 855 | 946 |
| APG07790 modified | 259 | Signal | PF07691 | PA14 | 18 | 145 |
| (APG07790.2) | | peptide | PF03495 | Binary toxB | 186 | 599 |
| | | removed | PF09259 | Fve | 830 | 921 |
| APG07790 modified | 260 | Alternate | PF07691 | PA14 | 43 | 170 |
| (APG07790.1) | | start | PF03495 | Binary toxB | 211 | 624 |
| | | | PF09259 | Fve | 855 | 946 |
| APG07803 | 261 | | PF03945 | Endotoxin N | 89 | 341 |
| | | | PF00555 | Endotoxin M | 352 | 533 |
| | | | PF03944 | Endotoxin C | 548 | 690 |
| APG07803 modified | 262 | Alternate | PF03945 | Endotoxin N | 68 | 320 |
| (APG07803.1) | | start and | PF00555 | Endotoxin M | 331 | 512 |
| | | 3′ | PF03944 | Endotoxin C | 527 | 668 |
| | | Truncation | | | | |
| APG07818 | 263 | | PF05431 | Toxin 10 | 207 | 399 |
| APG07818 modified | 264 | Signal | PF05431 | Toxin 10 | 178 | 370 |
| (APG07818.1) | | peptide | | | | |
| | | removed | | | | |
| APG07857 | 265 | | PF01823 | MACPF | 117 | 327 |
| APG07860 | 266 | | PF03945 | Endotoxin N | 67 | 284 |
| | | | PF00555 | Endotoxin M | 292 | 495 |
| | | | PF03944 | Endotoxin C | 505 | 634 |
| APG07860 modified | 267 | 3′ | PF03945 | Endotoxin N | 67 | 284 |
| (APG07860.1) | | Truncation | PF00555 | Endotoxin M | 292 | 495 |
| | | | PF03944 | Endotoxin C | 505 | 633 |
| APG07866 | 268 | | PF03945 | Endotoxin N | 138 | 321 |
| | | | PF05588 | Botulinum | 463 | 613 |
| | | | | HA-17 | | |
| APG07870 | 269 | | PF03945 | Endotoxin N | 97 | 306 |
| | | | PF00555 | Endotoxin M | 343 | 533 |
| | | | PF03944 | Endotoxin C | 543 | 681 |
| APG07870 modified | 270 | Alternate | PF03945 | Endotoxin N | 73 | 283 |
| (APG07870.2) | | start and | PF00555 | Endotoxin M | 320 | 510 |
| | | 3′ | PF03944 | Endotoxin C | 520 | 657 |
| | | Truncation | | | | |
| APG07870 modified | 271 | Alternate | PF03945 | Endotoxin N | 74 | 283 |
| (APG07870.1) | | start | PF00555 | Endotoxin M | 320 | 510 |
| | | | PF03944 | Endotoxin C | 520 | 658 |
| APG07961 | 272 | | PF01338 | Bac thur toxin | 16 | 240 |
| APG07983 | 273 | | PF03318 | ETX MTX2 | 23 | 262 |
| APG08039 | 274 | | PF06101 | DUF946 | 27 | 251 |
| APG08039 modified | 275 | Alternate | PF06101 | DUF946 | 21 | 245 |
| (APG08039.1) | | start | | | | |
| APG08065 | 276 | | PF03945 | Endotoxin N | 116 | 310 |
| | | | PF00555 | Endotoxin M | 318 | 541 |
| | | | PF03944 | Endotoxin C | 551 | 618 |
| | | | PF03944 | Endotoxin C | 611 | 670 |
| APG08065 modified | 277 | 3′ | PF03945 | Endotoxin N | 116 | 310 |
| (APG08065.1) | | Truncation | PF00555 | Endotoxin M | 318 | 541 |
| | | | PF03944 | Endotoxin C | 551 | 618 |
| | | | PF03944 | Endotoxin C | 611 | 669 |
| APG08088 | 278 | | PF03318 | ETX MTX2 | 30 | 252 |
| APG08088 modified | 279 | Alternate | PF03318 | ETX MTX2 | 27 | 249 |
| (APG08088.1) | | start | | | | |
| APG08108 | 280 | | no PFAM | | | |
| | | | domains | | | |
| APG08139 | 281 | | PF01338 | Bac thur toxin | 7 | 228 |
| APG08174 | 282 | | PF03945 | Endotoxin N | 68 | 293 |
| | | | PF00555 | Endotoxin M | 301 | 508 |
| | | | PF03944 | Endotoxin C | 518 | 656 |
| APG08174 modified | 283 | Alternate | PF03945 | Endotoxin N | 62 | 288 |
| (APG08174.2) | | start and | PF00555 | Endotoxin M | 296 | 503 |
| | | 3′ | PF03944 | Endotoxin C | 513 | 650 |
| | | Truncation | | | | |
| APG08174 modified | 284 | Alternate | PF03945 | Endotoxin N | 63 | 288 |
| (APG08174.1) | | start | PF00555 | Endotoxin M | 296 | 503 |
| | | | PF03944 | Endotoxin C | 513 | 651 |
| APG08230 | 285 | | PF01338 | Bac thur toxin | 27 | 250 |
| APG08230 modified | 286 | Alternate | PF01338 | Bac thur toxin | 16 | 239 |
| (APG08230.1) | | start | | | | |
| APG08278 | 287 | | PF03318 | ETX MTX2 | 109 | 307 |
| APG08278 modified | 288 | Alternate | PF03318 | ETX MTX2 | 91 | 289 |
| (APG08278.1) | | start | | | | |
| APG08278 modified | 289 | Signal | PF03318 | ETX MTX2 | 59 | 260 |
| (APG08278.2) | | peptide | | | | |
| | | removed | | | | |
| APG08307 | 290 | | PF03318 | ETX MTX2 | 60 | 281 |
| APG08307 modified | 291 | Signal | PF03318 | ETX MTX2 | 28 | 249 |
| (APG08307.1) | | peptide | | | | |
| | | removed | | | | |
| APG08350 | 292 | | PF03945 | Endotoxin N | 70 | 273 |
| | | | PF00555 | Endotoxin M | 354 | 491 |
| | | | PF03944 | Endotoxin C | 570 | 703 |
| APG08350 modified | 293 | 3′ | PF03945 | Endotoxin N | 70 | 273 |
| (APG08350.1) | | Truncation | PF00555 | Endotoxin M | 354 | 495 |
| | | | PF03944 | Endotoxin C | 570 | 703 |
| APG08396 | 294 | | PF03945 | Endotoxin N | 43 | 267 |
| | | | PF00555 | Endotoxin M | 275 | 466 |
| | | | PF03944 | Endotoxin C | 476 | 613 |
| APG08396 modified | 295 | Alternate | PF03945 | Endotoxin N | 34 | 258 |
| (APG08396.1) | | start | PF00555 | Endotoxin M | 266 | 457 |
| | | | PF03944 | Endotoxin C | 467 | 604 |
| APG08396 modified | 296 | Alternate | PF03945 | Endotoxin N | 34 | 258 |
| (APG08396.2) | | start and | PF00555 | Endotoxin M | 266 | 457 |
| | | 3′ | PF03944 | Endotoxin C | 467 | 603 |
| | | Truncation | | | | |
| APG08461 | 297 | | no PFAM | | | |
| | | | domains | | | |
| APG08525 | 298 | | no PFAM | | | |
| | | | domains | | | |
| APG08525 modified | 299 | Alternate | no PFAM | | | |
| (APG08525.1) | | start | domains | | | |
| APG08589 | 300 | | PF03318 | ETX MTX2 | 27 | 249 |
| APG08631 | 301 | | PF01338 | Bac thur toxin | 30 | 250 |
| APG08631 modified | 302 | Alternate | PF01338 | Bac thur toxin | 14 | 234 |
| (APG08631.1) | | start | | | | |
| APG08657 | 303 | | PF03945 | Endotoxin N | 89 | 295 |
| | | | PF03944 | Endotoxin C | 525 | 664 |
| APG08657 modified | 304 | 3′ | PF03945 | Endotoxin N | 88 | 295 |
| (APG08657.1) | | Truncation | PF00555 | Endotoxin M | 303 | 515 |
| | | | PF03944 | Endotoxin C | 525 | 663 |
| APG08665 | 305 | | PF03945 | Endotoxin N | 118 | 348 |
| APG08665 modified | 306 | Signal | PF03945 | Endotoxin N | 80 | 310 |
| (APG08665.2) | | peptide | | | | |
| | | removed | | | | |
| | | and 3′ | | | | |
| | | Truncation | | | | |
| APG08665 modified | 307 | Signal | PF03945 | Endotoxin N | 80 | 310 |
| (APG08665.1) | | peptide | | | | |
| | | removed | | | | |
| APG08693 | 308 | | no PFAM | | | |
| | | | domains | | | |
| APG08693 modified | 309 | Signal | no PFAM | | | |
| (APG08693.1) | | peptide | domains | | | |
| | | removed | | | | |
| APG08817 | 310 | | no PFAM | | | |
| | | | domains | | | |
| APG08817 modified | 311 | Alternate | no PFAM | | | |
| (APG08817.1) | | start | domains | | | |
| APG08817 modified | 312 | Signal | no PFAM | | | |
| (APG08817.2) | | peptide | domains | | | |
| | | removed | | | | |
| APG08898 | 313 | | no PFAM | | | |
| | | | domains | | | |
| APG08898 modified | 314 | Alternate | no PFAM | | | |
| (APG08898.1) | | start | domains | | | |
| APG08919 | 315 | | no PFAM | | | |
| | | | domains | | | |
| APG08919 modified | 316 | Alternate | no PFAM | | | |
| (APG08919.1) | | start | domains | | | |
| APG08931 | 317 | | PF03945 | Endotoxin N | 66 | 304 |
| | | | PF03944 | Endotoxin C | 515 | 670 |
| APG08931 modified | 318 | 3′ | PF03945 | Endotoxin N | 66 | 304 |
| (APG08931.1) | | Truncation | PF03944 | Endotoxin C | 515 | 669 |
| APG09084 | 319 | | PF03318 | ETX MTX2 | 19 | 273 |
| APG09232 | 320 | | no PFAM | | | |
| | | | domains | | | |
| APG09232 modified | 321 | Signal | no PFAM | | | |
| (APG09232.1) | | peptide | domains | | | |
| | | removed | | | | |
| APG09234 | 322 | | PF03495 | Binary toxB | 94 | 516 |
| | | | PF03318 | ETX MTX2 | 156 | 285 |
| APG09234 CryBP1 | 323 | | PF07029 | CryBP1 | 43 | 193 |
| (APG08851) | | | | | | |
| APG09296 | 324 | | PF12495 | Vip3A N | 16 | 191 |
| APG09296 modified | 325 | Alternate | PF12495 | Vip3A N | 12 | 187 |
| (APG09296.1) | | start | | | | |
| APG09413 | 326 | | no PFAM | | | |
| | | | domains | | | |
| APG09484 | 327 | | no PFAM | | | |
| | | | domains | | | |
| APG09484 modified | 328 | Signal | no PFAM | | | |
| (APG09484.1) | | peptide | domains | | | |
| | | removed | | | | |
| APG09543 | 329 | | PF03945 | Endotoxin N | 94 | 292 |
| APG09543 modified | 330 | Signal | PF03945 | Endotoxin N | 56 | 254 |
| (APG09543.1) | | peptide | | | | |
| | | removed | | | | |
| APG09545 | 331 | | PF07691 | PA14 | 64 | 188 |
| | | | PF03495 | Binary toxB | 226 | 643 |
| APG09545 modified | 332 | Alternate | PF07691 | PA14 | 45 | 169 |
| (APG09545.1) | | start | PF03495 | Binary toxB | 207 | 624 |
| APG09573 | 333 | | PF03945 | Endotoxin N | 90 | 315 |
| | | | PF00555 | Endotoxin M | 323 | 530 |
| | | | PF03944 | Endotoxin C | 540 | 678 |
| APG09573 modified | 334 | Alternate | PF03945 | Endotoxin N | 62 | 288 |
| (APG09573.2) | | start and | PF00555 | Endotoxin M | 296 | 503 |
| | | 3′ | PF03944 | Endotoxin C | 513 | 650 |
| | | Truncation | | | | |
| APG09573 modified | 335 | Alternate | PF03945 | Endotoxin N | 63 | 288 |
| (APG09573.1) | | start | PF00555 | Endotoxin M | 296 | 503 |
| | | | PF03944 | Endotoxin C | 513 | 651 |
| APG09589 | 336 | | PF06355 | Aegerolysin | 66 | 178 |
| APG09630 | 337 | | PF03945 | Endotoxin N | 176 | 377 |
| APG09630 modified | 338 | Alternate | PF03945 | Endotoxin N | 139 | 340 |
| (APG09630.1) | | start | | | | |
| APG09682 | 339 | | PF03318 | ETX MTX2 | 24 | 251 |
| APG09864 | 340 | | PF03318 | ETX MTX2 | 39 | 301 |
| APG09864 modified | 341 | Signal | PF03318 | ETX MTX2 | 9 | 264 |
| (APG09864.1) | | peptide | | | | |
| | | removed | | | | |
| APG09877 | 342 | | PF03945 | Endotoxin N | 76 | 312 |
| | | | PF00555 | Endotoxin M | 320 | 554 |
| | | | PF03944 | Endotoxin C | 564 | 692 |
| APG09936 | 343 | | PF03945 | Endotoxin N | 15 | 184 |
| APG09936 modified | 344 | Alternate | PF03945 | Endotoxin N | 15 | 184 |
| (APG09936.1) | | start | | | | |
| APG09947 | 345 | | PF03945 | Endotoxin N | 103 | 330 |
| APG09947 modified | 346 | Signal | PF03945 | Endotoxin N | 62 | 289 |
| (APG09947.1) | | peptide | | | | |
| | | removed | | | | |
| APG09984 | 347 | | PF07691 | PA14 | 15 | 141 |
| | | | PF03495 | Binary toxB | 186 | 598 |
| | | | PF09259 | Fve | 841 | 929 |
| APG00905.0 | 348 | | PF05431 | Insecticidal | 207 | 395 |
| | | | | Crystal Toxin, | | |
| | | | | P42 | | |
| APG00905.1 | 349 | Signal | PF05431 | Insecticidal | 178 | 366 |
| | | peptide | | Crystal Toxin, | | |
| | | removed | | P42 | | |
| APG02585.0 | 350 | | PF07691 | PA14 domain | 52 | 182 |
| | | | PF03495 | Clostridial | 223 | 629 |
| | | | | binary toxin | | |
| | | | | B/anthrax toxin | | |
| | | | | PA | | |
| APG02585.1 | 351 | Alternate | PF07691 | PA14 domain | 50 | 180 |
| | | start | | | | |
| | | | PF03495 | Clostridial | 221 | 627 |
| | | | | binary toxin | | |
| | | | | B/anthrax toxin | | |
| | | | | PA | | |
| APG03000.0 | 352 | | PF03945 | delta | 41 | 272 |
| | | | | endotoxin, N- | | |
| | | | | terminal | | |
| | | | | domain | | |
| | | | PF00555 | delta endotoxin | 280 | 470 |
| | | | PF03944 | delta endotoxin | 480 | 616 |
| APG03995.0 | 353 | | PF03318 | Clostridium | 142 | 250 |
| | | | | epsilon toxin | | |
| | | | | ETX/Bacillus | | |
| | | | | mosquitocidal | | |
| | | | | toxin MTX2 | | |
| APG03995.1 | 354 | Signal | PF03318 | Clostridium | 93 | 201 |
| | | peptide | | epsilon toxin | | |
| | | removed | | ETX/Bacillus | | |
| | | | | mosquitocidal | | |
| | | | | toxin MTX2 | | |
| APG04196.0 | 355 | | no PFAM | | | |
| | | | domains | | | |
| APG04196.1 | 356 | Signal | no PFAM | | | |
| | | peptide | domains | | | |
| | | removed | | | | |
| APG05497.0 | 357 | | PF03318 | Clostridium | 84 | 285 |
| | | | | epsilon toxin | | |
| | | | | ETX/Bacillus | | |
| | | | | mosquitocidal | | |
| | | | | toxin MTX2 | | |
| APG05497.1 | 358 | Signal | PF03318 | Clostridium | 56 | 257 |
| | | peptide | | epsilon toxin | | |
| | | removed | | ETX/Bacillus | | |
| | | | | mosquitocidal | | |
| | | | | toxin MTX2 | | |
| APG06291.0 | 359 | | PF03318 | Clostridium | 123 | 252 |
| | | | | epsilon toxin | | |
| | | | | ETX/Bacillus | | |
| | | | | mosquitocidal | | |
| | | | | toxin MTX2 | | |
| APG06291.1 | 360 | Signal | PF03318 | Clostridium | 94 | 228 |
| | | peptide | | epsilon toxin | | |
| | | removed | | ETX/Bacillus | | |
| | | | | mosquitocidal | | |
| | | | | toxin MTX2 | | |
| APG06371.0 | 361 | | PF03318 | Clostridium | 94 | 297 |
| | | | | epsilon toxin | | |
| | | | | ETX/Bacillus | | |
| | | | | mosquitocidal | | |
| | | | | toxin MTX2 | | |
| APG06371.1 | 362 | Signal | PF03318 | Clostridium | 61 | 264 |
| | | peptide | | epsilon toxin | | |
| | | removed | | ETX/Bacillus | | |
| | | | | mosquitocidal | | |
| | | | | toxin MTX2 | | |
| APG07577.0 | 363 | | PF07691 | PA14 domain | 45 | 168 |
| | | | PF03495 | Clostridial | 211 | 623 |
| | | | | binary toxin | | |
| | | | | B/anthrax toxin | | |
| | | | | PA | | |
| | | | PF09259 | Fungal | 866 | 935 |
| | | | | immunomodulatory | | |
| | | | | protein | | |
| | | | | Fve | | |
| APG07577.1 | 364 | Signal | PF07691 | PA14 domain | 20 | 143 |
| | | peptide | | | | |
| | | removed | | | | |
| | | | PF03495 | Clostridial | 186 | 598 |
| | | | | binary toxin | | |
| | | | | B/anthrax toxin | | |
| | | | | PA | | |
| | | | PF09259 | Fungal | 841 | 910 |
| | | | | immunomodulatory | | |
| | | | | protein | | |
| | | | | Fve | | |
| APG07648.0 | 365 | | no PFAM | | | |
| | | | domains | | | |
| APG07648.1 | 366 | Signal | no PFAM | | | |
| | | peptide | domains | | | |
| | | removed | | | | |
| APG09231.0 | 367 | | PF03318 | Clostridium | 44 | 242 |
| | | | | epsilon toxin | | |
| | | | | ETX/Bacillus | | |
| | | | | mosquitocidal | | |
| | | | | toxin MTX2 | | |
| APG00923.0 | 368 | | PF03318 | Clostridium | 139 | 343 |
| | | | | epsilon toxin | | |
| | | | | ETX/Bacillus | | |
| | | | | mosquitocidal | | |
| | | | | toxin MTX2 | | |
| APG00923.1 | 369 | Alternate | PF03318 | Clostridium | 139 | 343 |
| | | start | | epsilon toxin | | |
| | | | | ETX/Bacillus | | |
| | | | | mosquitocidal | | |
| | | | | toxin MTX2 | | |
| APG00923.2 | 370 | Signal | PF03318 | Clostridium | 113 | 315 |
| | | peptide | | epsilon toxin | | |
| | | removed | | ETX/Bacillus | | |
| | | | | mosquitocidal | | |
| | | | | toxin MTX2 | | |
| APG00941.0 | 371 | | PF03945 | delta | 81 | 301 |
| | | | | endotoxin, N- | | |
| | | | | terminal | | |
| | | | | domain | | |
| | | | PF00555 | delta endotoxin | 307 | 523 |
| | | | PF03944 | delta endotoxin | 534 | 686 |
| APG00941.1 | 372 | 3′ | PF03945 | delta | 81 | 301 |
| | | Truncation | | endotoxin, N- | | |
| | | | | terminal | | |
| | | | | domain | | |
| | | | PF00555 | delta endotoxin | 307 | 523 |
| | | | PF03944 | delta endotoxin | 534 | 686 |
| APG01202.0 | 373 | | no PFAM | | | |
| | | | domains | | | |
| APG01202 CryBP1 | 374 | | PF07029 | CryBP1 protein | 3 | 48 |
| (APG04093.0) | | | | | | |
| APG01809.0 | 375 | | PF14200 | Ricin-type | 4 | 78 |
| | | | | beta-trefoil | | |
| | | | | lectin domain- | | |
| | | | | like | | |
| | | | PF05431 | Insecticidal | 86 | 278 |
| | | | | Crystal Toxin, | | |
| | | | | P42 | | |
| APG01809.1 | 376 | Alternate | PF14200 | Ricin-type | 4 | 78 |
| | | start | | beta-trefoil | | |
| | | | | lectin domain- | | |
| | | | | like | | |
| | | | PF05431 | Insecticidal | 86 | 278 |
| | | | | Crystal Toxin, | | |
| | | | | P42 | | |
| APG02194.0 | 377 | | PF03318 | Clostridium | 139 | 343 |
| | | | | epsilon toxin | | |
| | | | | ETX/Bacillus | | |
| | | | | mosquitocidal | | |
| | | | | toxin MTX2 | | |
| APG02194.1 | 378 | Alternate | PF03318 | Clostridium | 139 | 343 |
| | | start | | epsilon toxin | | |
| | | | | ETX/Bacillus | | |
| | | | | mosquitocidal | | |
| | | | | toxin MTX2 | | |
| APG02194.2 | 379 | Signal | PF03318 | Clostridium | 111 | 315 |
| | | peptide | | epsilon toxin | | |
| | | removed | | ETX/Bacillus | | |
| | | | | mosquitocidal | | |
| | | | | toxin MTX2 | | |
| APG02362.0 | 380 | | PF03318 | Clostridium | 141 | 342 |
| | | | | epsilon toxin | | |
| | | | | ETX/Bacillus | | |
| | | | | mosquitocidal | | |
| | | | | toxin MTX2 | | |
| APG02362.1 | 381 | Alternate | PF03318 | Clostridium | 141 | 342 |
| | | start | | epsilon toxin | | |
| | | | | ETX/Bacillus | | |
| | | | | mosquitocidal | | |
| | | | | toxin MTX2 | | |
| APG02362.2 | 382 | Signal | PF03318 | Clostridium | 113 | 314 |
| | | peptide | | epsilon toxin | | |
| | | removed | | ETX/Bacillus | | |
| | | | | mosquitocidal | | |
| | | | | toxin MTX2 | | |
| APG02421.0 | 383 | | PF03318 | Clostridium | 150 | 351 |
| | | | | epsilon toxin | | |
| | | | | ETX/Bacillus | | |
| | | | | mosquitocidal | | |
| | | | | toxin MTX2 | | |
| APG02421.1 | 384 | Alternate | PF03318 | Clostridium | 142 | 343 |
| | | start | | epsilon toxin | | |
| | | | | ETX/Bacillus | | |
| | | | | mosquitocidal | | |
| | | | | toxin MTX2 | | |
| APG02421.2 | 385 | Signal | PF03318 | Clostridium | 114 | 315 |
| | | peptide | | epsilon toxin | | |
| | | removed | | ETX/Bacillus | | |
| | | | | mosquitocidal | | |
| | | | | toxin MTX2 | | |
| APG02686.0 | 386 | | PF03318 | Clostridium | 150 | 351 |
| | | | | epsilon toxin | | |
| | | | | ETX/Bacillus | | |
| | | | | mosquitocidal | | |
| | | | | toxin MTX2 | | |
| APG02686.1 | 387 | Alternate | PF03318 | Clostridium | 142 | 343 |
| | | start | | epsilon toxin | | |
| | | | | ETX/Bacillus | | |
| | | | | mosquitocidal | | |
| | | | | toxin MTX2 | | |
| APG02686.2 | 388 | Signal | PF03318 | Clostridium | 114 | 315 |
| | | peptide | | epsilon toxin | | |
| | | removed | | ETX/Bacillus | | |
| | | | | mosquitocidal | | |
| | | | | toxin MTX2 | | |
| APG03297.0 | 389 | | PF03318 | Clostridium | 96 | 297 |
| | | | | epsilon toxin | | |
| | | | | ETX/Bacillus | | |
| | | | | mosquitocidal | | |
| | | | | toxin MTX2 | | |
| APG03297.1 | 390 | Alternate | PF03318 | Clostridium | 82 | 283 |
| | | start | | epsilon toxin | | |
| | | | | ETX/Bacillus | | |
| | | | | mosquitocidal | | |
| | | | | toxin MTX2 | | |
| APG03297.2 | 391 | Signal | PF03318 | Clostridium | 56 | 257 |
| | | peptide | | epsilon toxin | | |
| | | removed | | ETX/Bacillus | | |
| | | | | mosquitocidal | | |
| | | | | toxin MTX2 | | |
| APG03337.0 | 392 | | PF03318 | Clostridium | 139 | 343 |
| | | | | epsilon toxin | | |
| | | | | ETX/Bacillus | | |
| | | | | mosquitocidal | | |
| | | | | toxin MTX2 | | |
| APG03337.1 | 393 | Signal | PF03318 | Clostridium | 111 | 315 |
| | | peptide | | epsilon toxin | | |
| | | removed | | ETX/Bacillus | | |
| | | | | mosquitocidal | | |
| | | | | toxin MTX2 | | |
| APG03352.0 | 394 | | PF03318 | Clostridium | 141 | 252 |
| | | | | epsilon toxin | | |
| | | | | ETX/Bacillus | | |
| | | | | mosquitocidal | | |
| | | | | toxin MTX2 | | |
| APG03352.1 | 395 | Signal | PF03318 | Clostridium | 94 | 205 |
| | | peptide | | epsilon toxin | | |
| | | removed | | ETX/Bacillus | | |
| | | | | mosquitocidal | | |
| | | | | toxin MTX2 | | |
| APG03422.0 | 396 | | PF03318 | Clostridium | 174 | 378 |
| | | | | epsilon toxin | | |
| | | | | ETX/Bacillus | | |
| | | | | mosquitocidal | | |
| | | | | toxin MTX2 | | |
| APG03438.0 | 397 | | PF03945 | delta | 21 | 170 |
| | | | | endotoxin, N- | | |
| | | | | terminal | | |
| | | | | domain | | |
| APG03438.1 | 398 | Alternate | PF03945 | delta | 21 | 170 |
| | | start | | endotoxin, N- | | |
| | | | | terminal | | |
| | | | | domain | | |
| APG03891.0 | 399 | | PF03318 | Clostridium | 59 | 248 |
| | | | | epsilon toxin | | |
| | | | | ETX/Bacillus | | |
| | | | | mosquitocidal | | |
| | | | | toxin MTX2 | | |
| APG04251.0 | 400 | | no PFAM | | | |
| | | | domains | | | |
| APG04251.1 | 401 | Signal | no PFAM | | | |
| | | peptide | domains | | | |
| | | removed | | | | |
| APG04458.0 | 402 | | PF03945 | delta | 22 | 170 |
| | | | | endotoxin, N- | | |
| | | | | terminal | | |
| | | | | domain | | |
| APG04458.1 | 403 | Alternate | PF03945 | delta | 22 | 170 |
| | | start | | endotoxin, N- | | |
| | | | | terminal | | |
| | | | | domain | | |
| APG04650.0 | 404 | | PF03318 | Clostridium | 139 | 343 |
| | | | | epsilon toxin | | |
| | | | | ETX/Bacillus | | |
| | | | | mosquitocidal | | |
| | | | | toxin MTX2 | | |
| APG04650.1 | 405 | Alternate | PF03318 | Clostridium | 139 | 343 |
| | | start | | epsilon toxin | | |
| | | | | ETX/Bacillus | | |
| | | | | mosquitocidal | | |
| | | | | toxin MTX2 | | |
| APG04650.2 | 406 | Signal | PF03318 | Clostridium | 110 | 315 |
| | | peptide | | epsilon toxin | | |
| | | removed | | ETX/Bacillus | | |
| | | | | mosquitocidal | | |
| | | | | toxin MTX2 | | |
| APG04806.0 | 407 | | no PFAM | | | |
| | | | domains | | | |
| APG04806.1 | 408 | Signal | no PFAM | | | |
| | | peptide | domains | | | |
| | | removed | | | | |
| APG05226.0 | 409 | | PF01117 | Aerolysin toxin | 140 | 269 |
| APG05226.1 | 410 | Signal | PF01117 | Aerolysin toxin | 114 | 243 |
| | | peptide | | | | |
| | | removed | | | | |
| APG05337.0 | 411 | | no PFAM | | | |
| | | | domains | | | |
| APG05337.1 | 412 | Signal | no PFAM | | | |
| | | peptide | domains | | | |
| | | removed | | | | |
| APG06330.0 | 413 | | PF05431 | Insecticidal | 237 | 428 |
| | | | | Crystal Toxin, | | |
| | | | | P42 | | |
| APG06330.1 | 414 | Alternate | PF05431 | Insecticidal | 195 | 386 |
| | | start | | Crystal Toxin, | | |
| | | | | P42 | | |
| APG06330.2 | 415 | Alternate | PF05431 | Insecticidal | 164 | 355 |
| | | start | | Crystal Toxin, | | |
| | | | | P42 | | |
| APG06841.0 | 416 | | no PFAM | | | |
| | | | domains | | | |
| APG06841.1 | 417 | Signal | no PFAM | | | |
| | | peptide | domains | | | |
| | | removed | | | | |
| APG07160.0 | 418 | | no PFAM | | | |
| | | | domains | | | |
| APG07160.1 | 419 | Alternate | no PFAM | | | |
| | | start | domains | | | |
| APG07160.2 | 420 | Signal | no PFAM | | | |
| | | peptide | domains | | | |
| | | removed | | | | |
| APG07724.0 | 421 | | PF03945 | delta | 69 | 328 |
| | | | | endotoxin, N- | | |
| | | | | terminal | | |
| | | | | domain | | |
| | | | PF00555 | delta endotoxin | 337 | 515 |
| | | | PF03944 | delta endotoxin | 532 | 670 |
| APG07724.1 | 422 | Alternate | PF03945 | delta | 63 | 322 |
| | | start and 3′ | | endotoxin, N- | | |
| | | Truncation | | terminal | | |
| | | | | domain | | |
| | | | PF00555 | delta endotoxin | 331 | 509 |
| | | | PF03944 | delta endotoxin | 526 | 664 |
| APG07936.0 | 423 | | no PFAM | | | |
| | | | domains | | | |
| APG07936.1 | 424 | Signal | no PFAM | | | |
| | | peptide | domains | | | |
| | | removed | | | | |
| APG08381.0 | 425 | | PF03318 | Clostridium | 149 | 350 |
| | | | | epsilon toxin | | |
| | | | | ETX/Bacillus | | |
| | | | | mosquitocidal | | |
| | | | | toxin MTX2 | | |
| APG08381.1 | 426 | Alternate | PF03318 | Clostridium | 109 | 310 |
| | | start | | epsilon toxin | | |
| | | | | ETX/Bacillus | | |
| | | | | mosquitocidal | | |
| | | | | toxin MTX2 | | |
| APG09755.0 | 427 | | PF03318 | Clostridium | 124 | 236 |
| | | | | epsilon toxin | | |
| | | | | ETX/Bacillus | | |
| | | | | mosquitocidal | | |
| | | | | toxin MTX2 | | |
| APG09755.1 | 428 | Signal | PF03318 | Clostridium | 93 | 205 |
| | | peptide | | epsilon toxin | | |
| | | removed | | ETX/Bacillus | | |
| | | | | mosquitocidal | | |
| | | | | toxin MTX2 | | |
| APG09824.0 | 429 | | PF03945 | delta | 21 | 170 |
| | | | | endotoxin, N- | | |
| | | | | terminal | | |
| | | | | domain | | |
| APG09824.1 | 430 | Alternate | PF03945 | delta | 21 | 170 |
| | | start | | endotoxin, N- | | |
| | | | | terminal | | |
| | | | | domain | | |
| APG01515.0 | 431 | | PF03945 | delta | 71 | 320 |
| | | | | endotoxin, N- | | |
| | | | | terminal | | |
| | | | | domain | | |
| | | | PF00555 | delta endotoxin | 331 | 509 |
| | | | PF03944 | delta endotoxin | 526 | 664 |
| APG01515.1 | 432 | 3′ | PF03945 | delta | 71 | 260 |
| | | Truncation | | endotoxin, N- | | |
| | | | | terminal | | |
| | | | | domain | | |
| | | | PF00555 | delta endotoxin | 331 | 509 |
| | | | PF03944 | delta endotoxin | 526 | 664 |
| APG01515 CryBP1 | 433 | | no PFAM | | | |
| (APG08269.0) | | | domains | | | |
| APG01949.0 | 434 | | no PFAM | | | |
| | | | domains | | | |
| APG02436.0 | 435 | | PF03318 | Clostridium | 142 | 247 |
| | | | | epsilon toxin | | |
| | | | | ETX/Bacillus | | |
| | | | | mosquitocidal | | |
| | | | | toxin MTX2 | | |
| APG02436.1 | 436 | Signal | PF03318 | Clostridium | 93 | 198 |
| | | peptide | | epsilon toxin | | |
| | | removed | | ETX/Bacillus | | |
| | | | | mosquitocidal | | |
| | | | | toxin MTX2 | | |
| APG02554.0 | 437 | | PF03318 | Clostridium | 46 | 248 |
| | | | | epsilon toxin | | |
| | | | | ETX/Bacillus | | |
| | | | | mosquitocidal | | |
| | | | | toxin MTX2 | | |
| APG02886.0 | 438 | | PF01338 | Bacillus | 20 | 232 |
| | | | | thuringiensis | | |
| | | | | toxin | | |
| APG02886.1 | 439 | Alternate | PF01338 | Bacillus | 20 | 232 |
| | | start | | thuringiensis | | |
| | | | | toxin | | |
| APG03861.0 | 440 | | PF03318 | Clostridium | 65 | 314 |
| | | | | epsilon toxin | | |
| | | | | ETX/Bacillus | | |
| | | | | mosquitocidal | | |
| | | | | toxin MTX2 | | |
| APG03861.1 | 441 | Alternate | PF03318 | Clostridium | 62 | 311 |
| | | start | | epsilon toxin | | |
| | | | | ETX/Bacillus | | |
| | | | | mosquitocidal | | |
| | | | | toxin MTX2 | | |
| APG03861.2 | 442 | Signal | PF03318 | Clostridium | 34 | 283 |
| | | peptide | | epsilon toxin | | |
| | | removed | | ETX/Bacillus | | |
| | | | | mosquitocidal | | |
| | | | | toxin MTX2 | | |
| APG04374.0 | 443 | | PF03945 | delta | 107 | 322 |
| | | | | endotoxin, N- | | |
| | | | | terminal | | |
| | | | | domain | | |
| | | | PF03944 | delta endotoxin | 512 | 641 |
| | | | PF01473 | Putative cell | 694 | 710 |
| | | | | wall binding | | |
| | | | | repeat | | |
| | | | PF01473 | Putative cell | 781 | 800 |
| | | | | wall binding | | |
| | | | | repeat | | |
| | | | PF01473 | Putative cell | 803 | 818 |
| | | | | wall binding | | |
| | | | | repeat | | |
| APG04374.1 | 444 | 3′ | PF03945 | delta | 107 | 322 |
| | | Truncation | | endotoxin, N- | | |
| | | | | terminal | | |
| | | | | domain | | |
| | | | PF03944 | delta endotoxin | 512 | 641 |
| APG04374.2 | 445 | Signal | PF03945 | delta | 77 | 292 |
| | | peptide | | endotoxin, N- | | |
| | | removed | | terminal | | |
| | | | | domain | | |
| | | | PF03944 | delta endotoxin | 482 | 611 |
| | | | PF01473 | Putative cell | 664 | 680 |
| | | | | wall binding | | |
| | | | | repeat | | |
| | | | PF01473 | Putative cell | 694 | 708 |
| | | | | wall binding | | |
| | | | | repeat | | |
| | | | PF01473 | Putative cell | 751 | 770 |
| | | | | wall binding | | |
| | | | | repeat | | |
| | | | PF01473 | Putative cell | 773 | 788 |
| | | | | wall binding | | |
| | | | | repeat | | |
| APG04374.3 | 446 | Signal | PF03945 | delta | 77 | 292 |
| | | peptide | | endotoxin, N- | | |
| | | removed | | terminal | | |
| | | and 3′ | | domain | | |
| | | Truncation | | | | |
| | | | PF03944 | delta endotoxin | 482 | 611 |
| APG04547.0 | 447 | | no PFAM | | | |
| | | | domains | | | |
| APG04547.1 | 448 | Signal | no PFAM | | | |
| | | peptide | domains | | | |
| | | removed | | | | |
| APG05852.0 | 449 | | no PFAM | | | |
| | | | domains | | | |
| APG05852.1 | 450 | Signal | no PFAM | | | |
| | | peptide | domains | | | |
| | | removed | | | | |
| APG06492.0 | 451 | | PF03318 | Clostridium | 24 | 271 |
| | | | | epsilon toxin | | |
| | | | | ETX/Bacillus | | |
| | | | | mosquitocidal | | |
| | | | | toxin MTX2 | | |
| APG06587.0 | 452 | | PF03945 | delta | 113 | 292 |
| | | | | endotoxin, N- | | |
| | | | | terminal | | |
| | | | | domain | | |
| APG06587.1 | 453 | Signal | PF03945 | delta | 75 | 254 |
| | | peptide | | endotoxin, N- | | |
| | | removed | | terminal | | |
| | | | | domain | | |
| APG07911.0 | 454 | | PF14200 | Ricin-type | 31 | 98 |
| | | | | beta-trefoil | | |
| | | | | lectin domain- | | |
| | | | | like | | |
| | | | PF05431 | Insecticidal | 236 | 396 |
| | | | | Crystal Toxin, | | |
| | | | | P42 | | |
| APG07911.1 | 455 | Signal | PF14200 | Ricin-type | 4 | 68 |
| | | peptide | | beta-trefoil | | |
| | | removed | | lectin domain- | | |
| | | | | like | | |
| | | | PF05431 | Insecticidal | 207 | 367 |
| | | | | Crystal Toxin, | | |
| | | | | P42 | | |
| APG08051.0 | 456 | | no PFAM | | | |
| | | | domains | | | |
| APG08051.1 | 457 | Alternate | no PFAM | | | |
| | | start | domains | | | |
| APG08051.2 | 458 | Signal | no PFAM | | | |
| | | peptide | domains | | | |
| | | removed | | | | |

[0049] Recombinant or synthetic nucleic acids encoding the pesticidal polypeptides disclosed herein are also provided. Of particular interest are nucleic acid sequences that have been designed for expression in a plant of interest. That is, the nucleic acid sequence can be optimized for increased expression in a host plant. A pesticidal protein of the invention can be back-translated to produce a nucleic acid comprising codons optimized for expression in a particular host, for example, a crop plant. In another embodiment, the polynucleotides encoding the polypeptides provided herein may be optimized for increased expression in the transformed plant. That is, the polynucleotides can be synthesized using plant-preferred codons for improved expression. See, for example, Campbell and Gowri (1990) Plant Physiol. 92:1-11 for a discussion of host-preferred codon usage. Methods are available in the art for synthesizing plant-preferred genes. See, for example, U.S. Pat. Nos. 5,380,831, and 5,436,391, and Murray et al. (1989) Nucleic Acids Res. 17:477-498, herein incorporated by reference. Expression of such a coding sequence by the transformed plant (e.g., dicot or monocot) will result in the production of a pesticidal polypeptide and confer increased resistance in the plant to a pest. Recombinant and synthetic nucleic acid molecules encoding the pesticidal proteins of the invention do not include the naturally occurring bacterial sequence encoding the protein.

[0050] A “recombinant polynucleotide” or “recombinant nucleic acid” comprises a combination of two or more chemically linked nucleic acid segments which are not found directly joined in nature. By “directly joined” is intended the two nucleic acid segments are immediately adjacent and joined to one another by a chemical linkage. In specific embodiments, the recombinant polynucleotide comprises a polynucleotide of interest or a variant or fragment thereof such that an additional chemically linked nucleic acid segment is located either 5′, 3′ or internal to the polynucleotide of interest. Alternatively, the chemically-linked nucleic acid segment of the recombinant polynucleotide can be formed by deletion of a sequence. The additional chemically linked nucleic acid segment or the sequence deleted to join the linked nucleic acid segments can be of any length, including for example, 1, 2, 3, 4, 5, 6, 7, 8, 9, 10, 15, 20 or greater nucleotides. Various methods for making such recombinant polynucleotides include chemical synthesis or by the manipulation of isolated segments of polynucleotides by genetic engineering techniques, In specific embodiments, the recombinant polynucleotide can comprise a recombinant DNA sequence or a recombinant RNA sequence. A “fragment of a recombinant polynucleotide or nucleic acid” comprises at least one of a combination of two or more Chemically linked amino acid segments which are not found directly joined in nature.

[0051] Fragments of a polynucleotide (RNA or DNA) may encode protein fragments that retain activity. In specific embodiments, a fragment of a recombinant polynucleotide or a recombinant polynucleotide construct comprises at least one junction of the two or more chemically linked or operably linked nucleic acid segments which are not found directly joined in nature. A fragment of a polynucleotide that encodes a biologically active portion of a polypeptide that retains pesticidal activity will encode at least 25, 30, 40, 50, 60, 70, 75, 80, 90, 100, 110, 120, 125, 130, 140, 150, 160, 170, 175, 180, contiguous amino acids, or up to the total number of amino acids present in a full-length polypeptide as set forth in SEQ ID NO: 1, 2, 3, 4, 5, 6, 7, 8, 9, 10, 11, 12, 13, 14, 15, 16, 17, 18, 19, 20, 21, 22, 23, 24, 25, 26, 27, 28, 29, 30, 31, 32, 33, 34, 35, 36, 37, 38, 39, 40, 41, 42, 43, 44, 45, 46, 47, 48, 49, 50, 51, 52, 53, 54, 55, 56, 57, 58, 59, 60, 61, 62, 63, 64, 65, 66, 67, 68, 69, 70, 71, 72, 73, 74, 75, 76, 77, 78, 79, 80, 81, 82, 83, 84, 85, 86, 87, 88, 89, 90, 91, 92, 93, 94, 95, 96, 97, 98, 99, 100, 101, 102, 103, 104, 105, 106, 107, 108, 109, 110, 111, 112, 113, 114, 115, 116, 117, 118, 119, 120, 121, 122, 123, 124, 125, 126, 127, 128, 129, 130, 131, 132, 133, 134, 135, 136, 137, 138, 139, 140, 141, 142, 143, 144, 145, 146, 147, 148, 149, 150, 151, 152, 153, 154, 155, 156, 157, 158, 159, 160, 161, 162, 163, 164, 165, 166, 167, 168, 169, 170, 171, 172, 173, 174, 175, 176, 177, 178, 179, 180, 181, 182, 183, 184, 185, 186, 187, 188, 189, 190, 191, 192, 193, 194, 195, 196, 197, 198, 199, 200, 201, 202, 203, 204, 205, 206, 207, 208, 209, 210, 211, 212, 213, 214, 215, 216, 217, 218, 219, 220, 221, 222, 223, 224, 225, 226, 227, 228, 229, 230, 231, 232, 233, 234, 235, 236, 237, 238, 239, 240, 241, 242, 243, 244, 245, 246, 247, 248, 249, 250, 251, 252, 253, 254, 255, 256, 257, 258, 259, 260, 261, 262, 263, 264, 265, 266, 267, 268, 269, 270, 271, 272, 273, 274, 275, 276, 277, 278, 279, 280, 281, 282, 283, 284, 285, 286, 287, 288, 289, 290, 291, 292, 293, 294, 295, 296, 297, 298, 299, 300, 301, 302, 303, 304, 305, 306, 307, 308, 309, 310, 311, 312, 313, 314, 315, 316, 317, 318, 319, 320, 321, 322, 323, 324, 325, 326, 327, 328, 329, 330, 331, 332, 333, 334, 335, 336, 337, 338, 339, 340, 341, 342, 343, 344, 345, 346, 347, 348, 349, 350, 351, 352, 353, 354, 355, 356, 357, 358, 359, 360, 361, 362, 363, 364, 365, 366, 367, 368, 369, 370, 371, 372, 373, 374, 375, 376, 377, 378, 379, 380, 381, 382, 383, 384, 385, 386, 387, 388, 389, 390, 391, 392, 393, 394, 395, 396, 397, 398, 399, 400, 401, 402, 403, 404, 405, 406, 407, 408, 409, 410, 411, 412, 413, 414, 415, 416, 417, 418, 419, 420, 421, 422, 423, 424, 425, 426, 427, 428, 429, 430, 431, 432, 433, 434, 435, 436, 437, 438, 439, 440, 441, 442, 443, 444, 445, 446, 447, 448, 449, 450, 451, 452, 453, 454, 455, 456, 457, and/or 458. In specific embodiments, such polypeptide fragments are active fragment, and in still other embodiments, the polypeptide fragment comprises a recombinant polypeptide fragment. As used herein, a fragment of a recombinant polypeptide comprises at least one of a combination of two or more chemically linked amino acid segments which are not found directly joined in nature.

[0052] By “Variants” is intended to mean substantially similar sequences. For polynucleotides, a variant comprises a deletion and/or addition of one or more nucleotides at one or more internal sites within the native polynucleotide and/or a substitution of one or more nucleotides at one or more sites in the native polynucleotide. As used herein, a “native” polynucleotide or polypeptide comprises a naturally occurring nucleotide sequence or amino acid sequence, respectively.

[0053] Variants of a particular polynucleotide of the invention (i.e., the reference polynucleotide) can also be evaluated by comparison of the percent sequence identity between the polypeptide encoded by a variant polynucleotide and the polypeptide encoded by the reference polynucleotide. Thus, for example, an isolated polynucleotide that encodes a polypeptide with a given percent sequence identity to the polypeptide of SEQ ID NO: 1, 2, 3, 4, 5, 6, 7, 8, 9, 10, 11, 12, 13, 14, 15, 16, 17, 18, 19, 20, 21, 22, 23, 24, 25, 26, 27, 28, 29, 30, 31, 32, 33, 34, 35, 36, 37, 38, 39, 40, 41, 42, 43, 44, 45, 46, 47, 48, 49, 50, 51, 52, 53, 54, 55, 56, 57, 58, 59, 60, 61, 62, 63, 64, 65, 66, 67, 68, 69, 70, 71, 72, 73, 74, 75, 76, 77, 78, 79, 80, 81, 82, 83, 84, 85, 86, 87, 88, 89, 90, 91, 92, 93, 94, 95, 96, 97, 98, 99, 100, 101, 102, 103, 104, 105, 106, 107, 108, 109, 110, 111, 112, 113, 114, 115, 116, 117, 118, 119, 120, 121, 122, 123, 124, 125, 126, 127, 128, 129, 130, 131, 132, 133, 134, 135, 136, 137, 138, 139, 140, 141, 142, 143, 144, 145, 146, 147, 148, 149, 150, 151, 152, 153, 154, 155, 156, 157, 158, 159, 160, 161, 162, 163, 164, 165, 166, 167, 168, 169, 170, 171, 172, 173, 174, 175, 176, 177, 178, 179, 180, 181, 182, 183, 184, 185, 186, 187, 188, 189, 190, 191, 192, 193, 194, 195, 196, 197, 198, 199, 200, 201, 202, 203, 204, 205, 206, 207, 208, 209, 210, 211, 212, 213, 214, 215, 216, 217, 218, 219, 220, 221, 222, 223, 224, 225, 226, 227, 228, 229, 230, 231, 232, 233, 234, 235, 236, 237, 238, 239, 240, 241, 242, 243, 244, 245, 246, 247, 248, 249, 250, 251, 252, 253, 254, 255, 256, 257, 258, 259, 260, 261, 262, 263, 264, 265, 266, 267, 268, 269, 270, 271, 272, 273, 274, 275, 276, 277, 278, 279, 280, 281, 282, 283, 284, 285, 286, 287, 288, 289, 290, 291, 292, 293, 294, 295, 296, 297, 298, 299, 300, 301, 302, 303, 304, 305, 306, 307, 308, 309, 310, 311, 312, 313, 314, 315, 316, 317, 318, 319, 320, 321, 322, 323, 324, 325, 326, 327, 328, 329, 330, 331, 332, 333, 334, 335, 336, 337, 338, 339, 340, 341, 342, 343, 344, 345, 346, 347, 348, 349, 350, 351, 352, 353, 354, 355, 356, 357, 358, 359, 360, 361, 362, 363, 364, 365, 366, 367, 368, 369, 370, 371, 372, 373, 374, 375, 376, 377, 378, 379, 380, 381, 382, 383, 384, 385, 386, 387, 388, 389, 390, 391, 392, 393, 394, 395, 396, 397, 398, 399, 400, 401, 402, 403, 404, 405, 406, 407, 408, 409, 410, 411, 412, 413, 414, 415, 416, 417, 418, 419, 420, 421, 422, 423, 424, 425, 426, 427, 428, 429, 430, 431, 432, 433, 434, 435, 436, 437, 438, 439, 440, 441, 442, 443, 444, 445, 446, 447, 448, 449, 450, 451, 452, 453, 454, 455, 456, 457, and/or 458 are disclosed. Percent sequence identity between any two polypeptides can be calculated using sequence alignment programs and parameters described elsewhere herein. Where any given pair of polynucleotides of the invention is evaluated by comparison of the percent sequence identity shared by the two polypeptides they encode, the percent sequence identity between the two encoded polypeptides is at least about 40%, 45%, 50%, 55%, 60%, 65%, 70%, 75%, 80%, 85%, 86%, 87%, 88%, 89%, 90%, 91%, 92%, 93%, 94%, 95%, 96%, 97%, 98%, 99% or more sequence identity to SEQ ID NO: 1, 2, 3, 4, 5, 6, 7, 8, 9, 10, 11, 12, 13, 14, 15, 16, 17, 18, 19, 20, 21, 22, 23, 24, 25, 26, 27, 28, 29, 30, 31, 32, 33, 34, 35, 36, 37, 38, 39, 40, 41, 42, 43, 44, 45, 46, 47, 48, 49, 50, 51, 52, 53, 54, 55, 56, 57, 58, 59, 60, 61, 62, 63, 64, 65, 66, 67, 68, 69, 70, 71, 72, 73, 74, 75, 76, 77, 78, 79, 80, 81, 82, 83, 84, 85, 86, 87, 88, 89, 90, 91, 92, 93, 94, 95, 96, 97, 98, 99, 100, 101, 102, 103, 104, 105, 106, 107, 108, 109, 110, 111, 112, 113, 114, 115, 116, 117, 118, 119, 120, 121, 122, 123, 124, 125, 126, 127, 128, 129, 130, 131, 132, 133, 134, 135, 136, 137, 138, 139, 140, 141, 142, 143, 144, 145, 146, 147, 148, 149, 150, 151, 152, 153, 154, 155, 156, 157, 158, 159, 160, 161, 162, 163, 164, 165, 166, 167, 168, 169, 170, 171, 172, 173, 174, 175, 176, 177, 178, 179, 180, 181, 182, 183, 184, 185, 186, 187, 188, 189, 190, 191, 192, 193, 194, 195, 196, 197, 198, 199, 200, 201, 202, 203, 204, 205, 206, 207, 208, 209, 210, 211, 212, 213, 214, 215, 216, 217, 218, 219, 220, 221, 222, 223, 224, 225, 226, 227, 228, 229, 230, 231, 232, 233, 234, 235, 236, 237, 238, 239, 240, 241, 242, 243, 244, 245, 246, 247, 248, 249, 250, 251, 252, 253, 254, 255, 256, 257, 258, 259, 260, 261, 262, 263, 264, 265, 266, 267, 268, 269, 270, 271, 272, 273, 274, 275, 276, 277, 278, 279, 280, 281, 282, 283, 284, 285, 286, 287, 288, 289, 290, 291, 292, 293, 294, 295, 296, 297, 298, 299, 300, 301, 302, 303, 304, 305, 306, 307, 308, 309, 310, 311, 312, 313, 314, 315, 316, 317, 318, 319, 320, 321, 322, 323, 324, 325, 326, 327, 328, 329, 330, 331, 332, 333, 334, 335, 336, 337, 338, 339, 340, 341, 342, 343, 344, 345, 346, 347, 348, 349, 350, 351, 352, 353, 354, 355, 356, 357, 358, 359, 360, 361, 362, 363, 364, 365, 366, 367, 368, 369, 370, 371, 372, 373, 374, 375, 376, 377, 378, 379, 380, 381, 382, 383, 384, 385, 386, 387, 388, 389, 390, 391, 392, 393, 394, 395, 396, 397, 398, 399, 400, 401, 402, 403, 404, 405, 406, 407, 408, 409, 410, 411, 412, 413, 414, 415, 416, 417, 418, 419, 420, 421, 422, 423, 424, 425, 426, 427, 428, 429, 430, 431, 432, 433, 434, 435, 436, 437, 438, 439, 440, 441, 442, 443, 444, 445, 446, 447, 448, 449, 450, 451, 452, 453, 454, 455, 456, 457, and/or 458. In other embodiments, the variant of the polynucleotide provided herein differs from the native sequence by at least 1, 2, 3, 4, 5, 6, 7, 8, 9, 10 or more nucleotides.

[0054] Variant polynucleotide and proteins also encompass sequences and proteins derived from a mutagenic and recombinogenic procedure such as DNA shuffling. With such a procedure, one or more different pesticidal protein disclosed herein (SEQ ID NO: 1-458) is manipulated to create a new pesticidal protein possessing the desired properties. In this manner, libraries of recombinant polynucleotides are generated from a population of related sequence polynucleotides comprising sequence regions that have substantial sequence identity and can be homologously recombined in vitro or in vivo. For example, using this approach, sequence motifs encoding a domain of interest may be shuffled between the pesticidial sequences provided herein and other known pesticidial genes to obtain a new gene coding for a protein with an improved property of interest, such as an increased Kₘ in the case of an enzyme. Strategies for such DNA shuffling are known in the art. See, for example, Stemmer (1994) Proc. Natl. Acad. Sci. USA 91:10747-10751; Stemmer (1994) Nature 370:389-391; Crameri et al. (1997) Nature Biotech. 15:436-438; Moore et al. (1997) J. Mol. Biol. 272:336-347; Zhang et al. (1997) Proc. Natl. Acad. Sci. USA 94:4504-4509; Crameri et al. (1998) Nature 391:288-291; and U.S. Pat. Nos. 5,605,793 and 5,837,458. A “shuffled” nucleic acid is a nucleic acid produced by a shuffling procedure such as any shuffling procedure set forth herein. Shuffled nucleic acids are produced by recombining (physically or virtually) two or more nucleic acids (or character strings), for example in an artificial, and optionally recursive, fashion. Generally, one or more screening steps are used in shuffling processes to identify nucleic acids of interest; this screening step can be performed before or after any recombination step. In some (but not all) shuffling embodiments, it is desirable to perform multiple rounds of recombination prior to selection to increase the diversity of the pool to be screened. The overall process of recombination and selection are optionally repeated recursively. Depending on context, shuffling can refer to an overall process of recombination and selection, or, alternately, can simply refer to the recombinational portions of the overall process.

[0055] In one embodiments, a method of obtaining a polynucleotide that encodes an improved polypeptide comprising pesticidal activity is provided, wherein the improved polypeptide has at least one improved property over any one of SEQ ID NOS: 1-458. Such methods can comprises (a) recombining a plurality of parental polynucleotides to produce a library of recombinant polynucleotides encoding recombinant pesticidal polypeptides; (b) screening the library to identify a recombinant polynucleotide that encodes an improved recombinant pesticidal polypeptide that has an enhanced property improved over the parental polynucleotide; (c) recovering the recombinant polynucleotide that encodes the improved recombinant pesticidal polypeptide identified in (b); and, (d) repeating steps (a), (b) and (c) using the recombinant polynucleotide recovered in step (c) as one of the plurality of parental polynucleotides in repeated step (a).

[0056] iii. Sequence Comparisons

[0057] As used herein, the term “identity” or “percent identity” when used with respect to a particular pair of aligned amino acid sequences, refers to the percent amino acid sequence identity that is obtained by counting the number of identical matches in the alignment and dividing such number of identical matches by the length of the aligned sequences. As used herein, the term “similarity” or “percent similarity” when used with respect to a particular pair of aligned amino acid sequences, refers to the sum of the scores that are obtained from a scoring matrix for each amino acid pair in the alignment divided by the length of the aligned sequences.

[0058] Unless otherwise stated, identity and similarity will be calculated by the Needleman-Wunsch global alignment and scoring algorithms (Needleman and Wunsch (1970) J. Mol. Biol. 48(3):443-453) as implemented by the “needle” program, distributed as part of the EMBOSS software package (Rice, P. Longden, I. and Bleasby, A., EMBOSS: The European Molecular Biology Open Software Suite, 2000, Trends in Genetics 16, (6) pp 276-277, versions 6.3.1 available from EMBnet at embnet.org/resource/emboss and emboss.sourceforge.net, among other sources) using default gap penalties and scoring matrices (EBLOSUM62 for protein and EDNAFULL for DNA). Equivalent programs may also be used. By “equivalent program” is intended any sequence comparison program that, for any two sequences in question, generates an alignment having identical nucleotide residue matches and an identical percent sequence identity when compared to the corresponding alignment generated by needle from EMBOSS version 6.3.1.

[0059] Additional mathematical algorithms are known in the art and can be utilized for the comparison of two sequences. See, for example, the algorithm of Karlin and Altschul (1990) Proc. Natl. Acad. Sci. USA 87:2264, modified as in Karlin and Altschul (1993) Proc. Natl. Acad. Sci. USA 90:5873-5877. Such an algorithm is incorporated into the BLAST programs of Altschul et al. (1990) J. Mol. Biol. 215:403. BLAST nucleotide searches can be performed with the BLASTN program (nucleotide query searched against nucleotide sequences) to obtain nucleotide sequences homologous to pesticidal-like nucleic acid molecules of the invention, or with the BLASTX program (translated nucleotide query searched against protein sequences) to obtain protein sequences homologous to pesticidal nucleic acid molecules of the invention. BLAST protein searches can be performed with the BLASTP program (protein query searched against protein sequences) to obtain amino acid sequences homologous to pesticidal protein molecules of the invention, or with the TBLASTN program (protein query searched against translated nucleotide sequences) to obtain nucleotide sequences homologous to pesticidal protein molecules of the invention. To obtain gapped alignments for comparison purposes, Gapped BLAST (in BLAST 2.0) can be utilized as described in Altschul et al. (1997) Nucleic Acids Res. 25:3389. Alternatively, PSI-Blast can be used to perform an iterated search that detects distant relationships between molecules. See Altschul et al. (1997) supra. When utilizing BLAST, Gapped BLAST, and PSI-Blast programs, the default parameters of the respective programs (e.g., BLASTX and BLASTN) can be used. Alignment may also be performed manually by inspection.

[0060] Two sequences are “optimally aligned” when they are aligned for similarity scoring using a defined amino acid substitution matrix (e.g., BLOSUM62), gap existence penalty and gap extension penalty so as to arrive at the highest score possible for that pair of sequences. Amino acid substitution matrices and their use in quantifying the similarity between two sequences are well-known in the art and described, e.g., in Dayhoff et al. (1978) “A model of evolutionary change in proteins.” In “Atlas of Protein Sequence and Structure,” Vol. 5, Suppl. 3 (ed. M. O. Dayhoff), pp. 345-352. Natl. Biomed. Res. Found., Washington, D.C. and Henikoff et al. (1992) Proc. Natl. Acad. Sci. USA 89:10915-10919. The BLOSUM62 matrix is often used as a default scoring substitution matrix in sequence alignment protocols. The gap existence penalty is imposed for the introduction of a single amino acid gap in one of the aligned sequences, and the gap extension penalty is imposed for each additional empty amino acid position inserted into an already opened gap. The alignment is defined by the amino acids positions of each sequence at which the alignment begins and ends, and optionally by the insertion of a gap or multiple gaps in one or both sequences, so as to arrive at the highest possible score. While optimal alignment and scoring can be accomplished manually, the process is facilitated by the use of a computer-implemented alignment algorithm, e.g., gapped BLAST 2.0, described in Altschul et al. (1997) Nucleic Acids Res. 25:3389-3402, and made available to the public at the National Center for Biotechnology Information Website (www.ncbi.nlm.nih.gov). Optimal alignments, including multiple alignments, can be prepared using, e.g., PSI-BLAST, available through www.ncbi.nlm.nih.gov and described by Altschul et al. (1997) Nucleic Acids Res. 25:3389-3402.

[0061] With respect to an amino acid sequence that is optimally aligned with a reference sequence, an amino acid residue “corresponds to” the position in the reference sequence with which the residue is paired in the alignment. The “position” is denoted by a number that sequentially identifies each amino acid in the reference sequence based on its position relative to the N-terminus. For example, in SEQ ID NO: 1 position 1 is M, position 2 is S, position 3 is I, etc. When a test sequence is optimally aligned with SEQ ID NO: 1, a residue in the test sequence that aligns with the I at position 3 is said to “correspond to position 3” of SEQ ID NO: 1. Owing to deletions, insertion, truncations, fusions, etc., that must be taken into account when determining an optimal alignment, in general the amino acid residue number in a test sequence as determined by simply counting from the N-terminal will not necessarily be the same as the number of its corresponding position in the reference sequence. For example, in a case where there is a deletion in an aligned test sequence, there will be no amino acid that corresponds to a position in the reference sequence at the site of deletion. Where there is an insertion in an aligned reference sequence, that insertion will not correspond to any amino acid position in the reference sequence. In the case of truncations or fusions there can be stretches of amino acids in either the reference or aligned sequence that do not correspond to any amino acid in the corresponding sequence.

[0062] iv. Antibodies

[0063] Antibodies to the polypeptides of the present invention, or to variants or fragments thereof, are also encompassed. Methods for producing antibodies are well known in the art (see, for example, Harlow and Lane (1988) Antibodies: A Laboratory Manual, Cold Spring Harbor Laboratory, Cold Spring Harbor, N.Y.; and U.S. Pat. No. 4,196,265). These antibodies can be used in kits for the detection and isolation of toxin polypeptides. Thus, this disclosure provides kits comprising antibodies that specifically bind to the polypeptides described herein, including, for example, polypeptides having the sequence of SEQ ID NOs: 1, 2, 3, 4, 5, 6, 7, 8, 9, 10, 11, 12, 13, 14, 15, 16, 17, 18, 19, 20, 21, 22, 23, 24, 25, 26, 27, 28, 29, 30, 31, 32, 33, 34, 35, 36, 37, 38, 39, 40, 41, 42, 43, 44, 45, 46, 47, 48, 49, 50, 51, 52, 53, 54, 55, 56, 57, 58, 59, 60, 61, 62, 63, 64, 65, 66, 67, 68, 69, 70, 71, 72, 73, 74, 75, 76, 77, 78, 79, 80, 81, 82, 83, 84, 85, 86, 87, 88, 89, 90, 91, 92, 93, 94, 95, 96, 97, 98, 99, 100, 101, 102, 103, 104, 105, 106, 107, 108, 109, 110, 111, 112, 113, 114, 115, 116, 117, 118, 119, 120, 121, 122, 123, 124, 125, 126, 127, 128, 129, 130, 131, 132, 133, 134, 135, 136, 137, 138, 139, 140, 141, 142, 143, 144, 145, 146, 147, 148, 149, 150, 151, 152, 153, 154, 155, 156, 157, 158, 159, 160, 161, 162, 163, 164, 165, 166, 167, 168, 169, 170, 171, 172, 173, 174, 175, 176, 177, 178, 179, 180, 181, 182, 183, 184, 185, 186, 187, 188, 189, 190, 191, 192, 193, 194, 195, 196, 197, 198, 199, 200, 201, 202, 203, 204, 205, 206, 207, 208, 209, 210, 211, 212, 213, 214, 215, 216, 217, 218, 219, 220, 221, 222, 223, 224, 225, 226, 227, 228, 229, 230, 231, 232, 233, 234, 235, 236, 237, 238, 239, 240, 241, 242, 243, 244, 245, 246, 247, 248, 249, 250, 251, 252, 253, 254, 255, 256, 257, 258, 259, 260, 261, 262, 263, 264, 265, 266, 267, 268, 269, 270, 271, 272, 273, 274, 275, 276, 277, 278, 279, 280, 281, 282, 283, 284, 285, 286, 287, 288, 289, 290, 291, 292, 293, 294, 295, 296, 297, 298, 299, 300, 301, 302, 303, 304, 305, 306, 307, 308, 309, 310, 311, 312, 313, 314, 315, 316, 317, 318, 319, 320, 321, 322, 323, 324, 325, 326, 327, 328, 329, 330, 331, 332, 333, 334, 335, 336, 337, 338, 339, 340, 341, 342, 343, 344, 345, 346, 347, 348, 349, 350, 351, 352, 353, 354, 355, 356, 357, 358, 359, 360, 361, 362, 363, 364, 365, 366, 367, 368, 369, 370, 371, 372, 373, 374, 375, 376, 377, 378, 379, 380, 381, 382, 383, 384, 385, 386, 387, 388, 389, 390, 391, 392, 393, 394, 395, 396, 397, 398, 399, 400, 401, 402, 403, 404, 405, 406, 407, 408, 409, 410, 411, 412, 413, 414, 415, 416, 417, 418, 419, 420, 421, 422, 423, 424, 425, 426, 427, 428, 429, 430, 431, 432, 433, 434, 435, 436, 437, 438, 439, 440, 441, 442, 443, 444, 445, 446, 447, 448, 449, 450, 451, 452, 453, 454, 455, 456, 457, and/or 458.

### II. Pests

[0064] The compositions and methods provided herein are useful against a variety of pests. “Pests” includes but is not limited to, insects, fungi, bacteria, nematodes, acarids, protozoan pathogens, animal-parasitic liver flukes, and the like. Pests of particular interest are insect pests, particularly insect pests that cause significant damage to agricultural plants. Insect pests include insects selected from the orders Coleoptera, Diptera, Hymenoptera, Lepidoptera, Mallophaga, Homoptera, Hemiptera, Orthroptera, Thysanoptera, Dermaptera, Isoptera, Anoplura, Siphonaptera, Trichoptera, or nematodes. In non-limiting embodiments, the insect pest comprises Western corn rootworm, Diabrotica virgifera virgifera; Fall armyworm, Spodoptera frugiperda; Colorado potato beetle, Leptinotarsa decemlineata; Corn earworm, Helicoverpa zea (in North America same species attacks cotton and called cotton bollworm); European corn borer, Ostrinia nubilalis; Black cutworm, Agrotis ipsilon; Diamondback moth, Plutella xylostella; Velvetbean caterpillar, Anticarsia gemmatalis; Southwestern corn borer, Diatraea grandiosella; Cotton bollworm, Helicoverpa armigera (found other than USA in rest of the world); Southern green stinkbug, Nezara viridula; Green stinkbug, Chinavia halaris; Brown marmorated stinkbug, Halyomorpha halys; and Brown stinbug, Euschistus servus, Euschistus heros (Neotropical brown stink bug OR soy stink bug); Piezodorus guildinii (red-banded stink bug); Dichelops melacanthus (no common name) and/or Dichelops furcatus (no common name); an aphid, such as a soybean aphid. In other embodiments, the pest comprises a nematode including, but not limited to, Meloidogyne hapla (Northern root-knot nematode); Meloidogyne enterolobii, Meloidogyne arenaria (peanut root-knot nematode); and Meloidogyne javanica.

[0065] The term “insect pests” as used herein refers to insects and other similar pests such as, for example, those of the order Acari including, but not limited to, mites and ticks. Insect pests of the present invention include, but are not limited to, insects of the order Lepidoptera, e.g. Achoroia grisella, Acleris gloverana, Acleris variana, Adoxophyes orana, Agrotis ipsilon, Alabama argillacea, Alsophila pometaria, Amyelois transitella, Anagasta kuehniella, Anarsia lineatella, Anisota senatoria, Antheraea pernyi, Anticarsia gemmatalis, Archips sp., Argyrotaenia sp., Athetis mindara, Bombyx mori, Bucculatrix thurberiella, Cadra cautella, Choristoneura sp., Cochylls hospes, Colias eurytheme, Corcyra cephalonica, Cydia latiferreanus, Cydia pomonella, Datana integerrima, Dendrolimus sibericus, Desmiafeneralis, Diaphania hyalinata, Diaphania nitidalis, Diatraea grandiosella, Diatraea saccharalis, Ennomos subsignaria, Eoreuma loftini, Esphestia elutella, Erannis tilaria, Estigmene acrea, Eulia salubricola, Eupocoellia ambiguella, Eupoecilia ambiguella, Euproctis chrysorrhoea, Euxoa messoria, Galleria mellonella, Grapholita molesta, Harrisina americana, Helicoverpa subflexa, Helicoverpa zea, Heliothis virescens, Hemileuca oliviae, Homoeosoma electellum, Hyphantia cunea, Keiferia lycopersicella, Lambdina fiscellaria fiscellaria, Lambdina fiscellaria lugubrosa, Leucoma salicis, Lobesia botrana, Loxostege sticticalis, Lymantria dispar, Macalla thyrisalis, Malacosoma sp., Mamestra brassicae, Mamestra configurata, Manduca quinquemaculata, Manduca sexta, Maruca testulalis, Melanchra picta, Operophtera brumata, Orgyia sp., Ostrinia nubilalis, Paleacrita vernata, Papilio cresphontes, Pectinophora gossypiella, Phryganidia californica, Phyllonorycter blancardella, Pieris napi, Pieris rapae, Plathypena scabra, Platynota flouendana, Platynota stultana, Platyptilia carduidactyla, Plodia interpunctella, Plutella xylostella, Pontia protodice, Pseudaletia unipuncta, Pseudoplasia includens, Sabulodes aegrotata, Schizura concinna, Sitotroga cerealella, Spilonta ocellana, Spodoptera sp., Thaurnstopoea pityocampa, Tinsola bisselliella, Trichoplusia hi, Udea rubigalis, Xylomyges curiails, and Yponomeuta padella.

[0066] Insect pests also include insects selected from the orders Diptera, Hymenoptera, Lepidoptera, Mallophaga, Homoptera, Hemiptera, Orthroptera, Thysanoptera, Dermaptera, Isoptera, Anoplura, Siphonaptera, Trichoptera, Coleoptera. Insect pests of the invention for the major crops include, but are not limited to: Maize: Ostrinia nubilalis, European corn borer; Agrotis ipsilon, black cutworm; Helicoverpa zeae, corn earworm; Spodoptera frugiperda, fall armyworm; Diatraea grandiosella, southwestern corn borer; Elasmopalpus lignosellus, lesser cornstalk borer; Diatraea saccharalis, surgarcane borer; western corn rootworm, e.g., Diabrotica virgifera virgifera; northern corn rootworm, e.g., Diabrotica longicornis barberi; southern corn rootworm, e.g., Diabrotica undecimpunctata howardi; Melanotus spp., wireworms; Cyclocephala borealis, northern masked chafer (white grub); Cyclocephala immaculata, southern masked chafer (white grub); Popillia japonica, Japanese beetle; Chaetocnema pulicaria, corn flea beetle; Sphenophorus maidis, maize billbug; Rhopalosiphum maidis, corn leaf aphid; Anuraphis maidiradicis, corn root aphid; Euschistus heros (Neotropical brown stink bug OR soy stink bug); Piezodorus guildinii (red-banded stink bug); Dichelops melacanthus (no common name); Dichelops furcatus (no common name); Blissus leucopterus leucopterus, chinch bug; Melanoplus femurrubrum, redlegged grasshopper; Melanoplus sanguinipes, migratory grasshopper; Hylemya platura, seedcorn maggot; Agromyza parvicornis, corn blotch leafminer; Anaphothrips obscrurus, grass thrips; Solenopsis milesta, thief ant; Tetranychus urticae, two spotted spider mite; Sorghum: Chilo partellus, sorghum borer; Spodoptera frugiperda, fall armyworm; Helicoverpa zea, corn earworm; Elasmopalpus lignosellus, leser cornstalk borer; Feltia subterranea, granulate cutworm; Phyllophaga crinita, white grub; Eleodes, Conoderus, and Aeolus spp., wireworms; Oulema melanopus, cereal leaf beetle; Chaetocnema pulicaria, corn flea beetle; Sphenophorus maidis, maize billbug; Rhopalosiphum maidis; corn leaf aphid; Sipha flava, yellow sugarcane aphid; chinch bug, e.g., Blissus leucopterus leucopterus; Contarinia sorghicola, sorghum midge; Tetranychus cinnabarinus, carmine spider mite; Tetranychus urticae, two-spotted spider mite; Wheat: Pseudaletia unipunctata, army worm; Spodoptera frugiperda, fall armyworm; Elasmopalpus lignosellus, lesser cornstalk borer; Agrotis orthogonia, pale western cutworm; Elasmopalpus lignosellus, lesser cornstalk borer; Oulema melanopus, cereal leaf beetle; Hypera punctata, clover leaf weevil; southern corn rootworm, e.g., Diabrotica undecimpunctata howardi; Russian wheat aphid; Schizaphis graminum, greenbug; Macrosiphum avenae, English grain aphid; Melanoplus femurrubrum, redlegged grasshopper; Melanoplus differentialis, differential grasshopper; Melanoplus sanguinipes, migratory grasshopper; Mayetiola destructor, Hessian fly; Sitodiplosis mosellana, wheat midge; Meromyza americana, wheat stem maggot; Hylemya coarctata, wheat bulb fly; Frankliniella fusca, tobacco thrips; Cephus cinctus, wheat stem sawfly; Aceria tulipae, wheat curl mite; Sunflower: Cylindrocupturus adspersus, sunflower stem weevil; Smicronyx fulus, red sunflower seed weevil; Smicronyx sordidus, gray sunflower seed weevil; Suleima helianthana, sunflower bud moth; Homoeosoma electellum, sunflower moth; Zygogramma exclamationis, sunflower beetle; Bothyrus gibbosus, carrot beetle; Neolasioptera murtfeldtiana, sunflower seed midge; Cotton: Heliothis virescens, tobacco budworm; Helicoverpa zea, cotton bollworm; Spodoptera exigua, beet armyworm; Pectinophora gossypiella, pink bollworm; boll weevil, e.g., Anthonomus grandis; Aphis gossypii, cotton aphid; Pseudatomoscelis seriatus, cotton fleahopper; Trialeurodes abutilonea, bandedwinged whitefly; Lygus lineolaris, tarnished plant bug; Melanoplus femurrubrum, redlegged grasshopper; Melanoplus differentialis, differential grasshopper; Thrips tabaci, onion thrips; Franklinkiella fusca, tobacco thrips; Tetranychus cinnabarinus, carmine spider mite; Tetranychus urticae, two-spotted spider mite; Rice: Diatraea saccharalis, sugarcane borer; Spodoptera frugiperda, fall armyworm; Helicoverpa zea, corn earworm; Colaspis brunnea, grape colaspis; Lissorhoptrus oryzophilus, rice water weevil; Sitophilus oryzae, rice weevil; Nephotettix nigropictus, rice leafhoper; chinch bug, e.g., Blissus leucopterus leucopterus; Acrosternum hilare, green stink bug; Soybean: Pseudoplusia includens, soybean looper; Anticarsia gemmatalis, velvetbean caterpillar; Plathypena scabra, green cloverworm; Ostrinia nubilalis, European corn borer; Agrotis ipsilon, black cutworm; Spodoptera exigua, beet armyworm; Heliothis virescens, tobacco budworm; Helicoverpa zea, cotton bollworm; Epilachna varivestis, Mexican bean beetle; Myzus persicae, green peach aphid; Empoasca fabae, potato leafhopper; Acrosternum hilare, green stink bug; Melanoplus femurrubrum, redlegged grasshopper; Melanoplus differentialis, differential grasshopper; Hylemya platura, seedcorn maggot; Sericothrips variabilis, soybean thrips; Thrips tabaci, onion thrips; Tetranychus turkestani, strawberry spider mite; Tetranychus urticae, two-spotted spider mite; Barley: Ostrinia nubilalis, European corn borer; Agrotis ipsilon, black cutworm; Schizaphis graminum, greenbug; chinch bug, e.g., Blissus leucopterus leucopterus; Acrosternum hilare, green stink bug; Euschistus serous, brown stink bug; Jylemya platura, seedcorn maggot; Mayetiola destructor, Hessian fly; Petrobia latens, brown wheat mite; Oil Seed Rape: Vrevicoryne brassicae, cabbage aphid; Phyllotreta cruciferae, crucifer flea beetle; Phyllotreta striolata, striped flea beetle; Phyllotreta nemorum, striped turnip flea beetle; Meligethes aeneus, rapeseed beetle; and the pollen beetles Meligethes rufimanus, Meligethes nigrescens, Meligethes canadianus, and Meligethes viridescens; Potato: Leptinotarsa decemlineata, Colorado potato beetle.

[0067] The methods and compositions provided herein may be effective against Hemiptera such as Lygus hesperus, Lygus lineolaris, Lygus pratensis, Lygus rugulipennis Popp, Lygus pabulinus, Calocoris norvegicus, Orthops compestris, Plesiocoris rugicollis, Cyrtopeltis modestus, Cyrtopeltis notatus, Spanagonicus albofasciatus, Diaphnocoris chlorinonis, Labopidicola allii, Pseudatomoscelis seriatus, Adelphocoris rapidus, Poecilocapsus lineatus, Blissus leucopterus, Nysius ericae, Nysius raphanus, Euschistus servus, Nezara viridula, Eurygaster, Coreidae, Pyrrhocoridae, Tinidae, Blostomatidae, Reduviidae, and Cimicidae. Pests of interest also include Araecerus fasciculatus, coffee bean weevil; Acanthoscelides obtectus, bean weevil; Bruchus rufmanus, broadbean weevil; Bruchus pisorum, pea weevil; Zabrotes subfasciatus, Mexican bean weevil; Diabrotica balteata, banded cucumber beetle; Cerotoma trifurcata, bean leaf beetle; Diabrotica virgifera, Mexican corn rootworm; Epitrix cucumeris, potato flea beetle; Chaetocnema confinis, sweet potato flea beetle; Hypera postica, alfalfa weevil; Anthonomus quadrigibbus, apple curculio; Sternechus paludatus, bean stalk weevil; Hypera brunnipennis, Egyptian alfalfa weevil; Sitophilus granaries, granary weevil; Craponius inaequalis, grape curculio; Sitophilus zeamais, maize weevil; Conotrachelus nenuphar, plum curculio; Euscepes postfaciatus, West Indian sweet potato weevil; Maladera castanea, Asiatic garden beetle; Rhizotrogus majalis, European chafer; Macrodactylus subspinosus, rose chafer; Tribolium confusum, confused flour beetle; Tenebrio obscurus, dark mealworm; Tribolium castaneum, red flour beetle; Tenebrio molitor, yellow mealworm.

[0068] Nematodes include parasitic nematodes such as root-knot, cyst, and lesion nematodes, including Heterodera spp., Meloidogyne spp., and Globodera spp.; particularly members of the cyst nematodes, including, but not limited to, Heterodera glycines (soybean cyst nematode); Heterodera schachtii (beet cyst nematode); Heterodera avenae (cereal cyst nematode); and Globodera rostochiensis and Globodera pailida (potato cyst nematodes). Lesion nematodes include Pratylenchus spp.

[0069] Insect pests may be tested for pesticidal activity of compositions of the invention in early developmental stages, e.g., as larvae or other immature forms. The insects may be reared in total darkness at from about 20.degree. C. to about 30.degree. C. and from about 30% to about 70% relative humidity. Bioassays may be performed as described in Czapla and Lang (1990) J. Econ. Entomol. 83 (6): 2480-2485. See, also the experimental section herein.

### III. Expression Cassettes

[0070] Polynucleotides encoding the pesticidal proteins provided herein can be provided in expression cassettes for expression in an organism of interest. The cassette will include 5′ and 3′ regulatory sequences operably linked to a polynucleotide encoding a pesticidal polypeptide provided herein that allows for expression of the polynucleotide. The cassette may additionally contain at least one additional gene or genetic element to be cotransformed into the organism. Where additional genes or elements are included, the components are operably linked. Alternatively, the additional gene(s) or element(s) can be provided on multiple expression cassettes. Such an expression cassette is provided with a plurality of restriction sites and/or recombination sites for insertion of the polynucleotides to be under the transcriptional regulation of the regulatory regions. The expression cassette may additionally contain a selectable marker gene.

[0071] The expression cassette will include in the 5′-3′ direction of transcription, a transcriptional and translational initiation region (i.e., a promoter), a pesticidal polynucleotide of the invention, and a transcriptional and translational termination region (i.e., termination region) functional in the organism of interest, i.e., a plant or bacteria. The promoters of the invention are capable of directing or driving expression of a coding sequence in a host cell. The regulatory regions (i.e., promoters, transcriptional regulatory regions, and translational termination regions) may be endogenous or heterologous to the host cell or to each other. As used herein, “heterologous” in reference to a sequence is a sequence that originates from a foreign species, or, if from the same species, is substantially modified from its native form in composition and/or genomic locus by deliberate human intervention. As used herein, a chimeric gene comprises a coding sequence operably linked to a transcription initiation region that is heterologous to the coding sequence.

[0072] Convenient termination regions are available from the Ti-plasmid of A. tumefaciens, such as the octopine synthase and nopaline synthase termination regions. See also Guerineau et al. (1991) Mol. Gen. Genet. 262:141-144; Proudfoot (1991) Cell 64:671-674; Sanfacon et al. (1991) Genes Dev. 5:141-149; Mogen et al. (1990) Plant Cell 2:1261-1272; Munroe et al. (1990) Gene 91:151-158; Ballas et al. (1989) Nucleic Acids Res. 17:7891-7903; and Joshi et al. (1987) Nucleic Acids Res. 15:9627-9639.

[0073] Additional regulatory signals include, but are not limited to, transcriptional initiation start sites, operators, activators, enhancers, other regulatory elements, ribosomal binding sites, an initiation codon, termination signals, and the like. See, for example, U.S. Pat. Nos. 5,039,523 and 4,853,331; EPO 0480762A2; Sambrook et al. (1992) Molecular Cloning: A Laboratory Manual, ed. Maniatis et al. (Cold Spring Harbor Laboratory Press, Cold Spring Harbor, N.Y.), hereinafter “Sambrook 11”; Davis et al., eds. (1980) Advanced Bacterial Genetics (Cold Spring Harbor Laboratory Press), Cold Spring Harbor, N.Y., and the references cited therein.

[0074] In preparing the expression cassette, the various DNA fragments may be manipulated, so as to provide for the DNA sequences in the proper orientation and, as appropriate, in the proper reading frame. Toward this end, adapters or linkers may be employed to join the DNA fragments or other manipulations may be involved to provide for convenient restriction sites, removal of superfluous DNA, removal of restriction sites, or the like. For this purpose, in vitro mutagenesis, primer repair, restriction, annealing, resubstitutions, e.g., transitions and transversions, may be involved.

[0075] A number of promoters can be used in the practice of the invention. The promoters can be selected based on the desired outcome. The nucleic acids can be combined with constitutive, inducible, tissue-preferred, or other promoters for expression in the organism of interest. See, for example, promoters set forth in WO 99/43838 and in U.S. Pat. Nos. 8,575,425; 7,790,846; 8,147,856; 8,586832; 7,772,369; 7,534,939; 6,072,050; 5,659,026; 5,608,149; 5,608,144; 5,604,121; 5,569,597; 5,466,785; 5,399,680; 5,268,463; 5,608,142; and 6,177,611; herein incorporated by reference.

[0076] For expression in plants, constitutive promoters also include CaMV 35S promoter (Odell et al. (1985) Nature 313:810-812); rice actin (McElroy et al. (1990) Plant Cell 2:163-171); ubiquitin (Christensen et al. (1989) Plant Mol. Biol. 12:619-632 and Christensen et al. (1992) Plant Mol. Biol. 18:675-689); pEMU (Last et al. (1991) Theor. Appl. Genet. 81:581-588); MAS (Velten et al. (1984) EMBO J. 3:2723-2730). Inducible promoters include those that drive expression of pathogenesis-related proteins (PR proteins), which are induced following infection by a pathogen. See, for example, Redolfi et al. (1983) Neth. J. Plant Pathol. 89:245-254; Uknes et al. (1992) Plant Cell 4:645-656; and Van Loon (1985) Plant Mol. Viral. 4:111-116; and WO 99/43819, herein incorporated by reference. Promoters that are expressed locally at or near the site of pathogen infection may also be used (Marineau et al. (1987) Plant Mol. Biol. 9:335-342; Matton et al. (1989) Molecular Plant—Microbe Interactions 2:325-331; Somsisch et al. (1986) Proc. Natl. Acad. Sci. USA 83:2427-2430; Somsisch et al. (1988) Mol. Gen. Genet. 2:93-98; and Yang (1996) Proc. Natl. Acad. Sci. USA 93:14972-14977; Chen et al. (1996) Plant J. 10:955-966; Zhang et al. (1994) Proc. Natl. Acad. Sci. USA 91:2507-2511; Warner et al. (1993) Plant J. 3:191-201; Siebertz et al. (1989) Plant Cell 1:961-968; Cordero et al. (1992) Physiol. Mol. Plant Path. 41:189-200; U.S. Pat. No. 5,750,386 (nematode-inducible); and the references cited therein).

[0077] Wound-inducible promoters may be used in the constructions of the invention. Such wound-inducible promoters include pin II promoter (Ryan (1990) Ann. Rev. Phytopath. 28:425-449; Duan et al. (1996) Nature Biotechnology 14:494-498); wun1 and wun2 (U.S. Pat. No. 5,428,148); win1 and win2 (Stanford et al. (1989) Mol. Gen. Genet. 215:200-208); systemin (McGurl et al. (1992) Science 225:1570-1573); WIP1 (Rohmeier et al. (1993) Plant Mol. Biol. 22:783-792; Eckelkamp et al. (1993) FEBS Letters 323:73-76); MPI gene (Corderok et al. (1994) Plant J. 6(2):141-150); and the like, herein incorporated by reference.

[0078] Tissue-preferred promoters for use in the invention include those set forth in Yamamoto et al. (1997) Plant J. 12(2):255-265; Kawamata et al. (1997) Plant Cell Physiol. 38(7):792-803; Hansen et al. (1997) Mol. Gen Genet. 254(3):337-343; Russell et al. (1997) Transgenic Res. 6(2):157-168; Rinehart et al. (1996) Plant Physiol. 112(3):1331-1341; Van Camp et al. (1996) Plant Physiol. 112(2):525-535; Canevascini et al. (1996) Plant Physiol. 112(2):513-524; Yamamoto et al. (1994) Plant Cell Physiol. 35(5):773-778; Lam (1994) Results Probl. Cell Differ. 20:181-196; Orozco et al. (1993) Plant Mol Biol. 23(6):1129-1138; Matsuoka et al. (1993) Proc Natl. Acad. Sci. USA 90(20):9586-9590; and Guevara-Garcia et al. (1993) Plant J. 4(3):495-505.

[0079] Leaf-preferred promoters include those set forth in Yamamoto et al. (1997) Plant J. 12(2):255-265; Kwon et al. (1994) Plant Physiol. 105:357-67; Yamamoto et al. (1994) Plant Cell Physiol. 35(5):773-778; Gotor et al. (1993) Plant J. 3:509-18; Orozco et al. (1993) Plant Mol. Biol. 23(6):1129-1138; and Matsuoka et al. (1993) Proc. Natl. Acad. Sci. USA 90(20):9586-9590.

[0080] Root-preferred promoters are known and include those in Hire et al. (1992) Plant Mol. Biol. 20(2):207-218 (soybean root-specific glutamine synthetase gene); Keller and Baumgartner (1991) Plant Cell 3(10):1051-1061 (root-specific control element); Sanger et al. (1990) Plant Mol. Biol. 14(3):433-443 (mannopine synthase (MAS) gene of Agrobacterium tumefaciens); and Miao et al. (1991) Plant Cell 3(1):11-22 (cytosolic glutamine synthetase (GS)); Bogusz et al. (1990) Plant Cell 2(7):633-641; Leach and Aoyagi (1991) Plant Science (Limerick) 79(1):69-76 (rolC and rolD); Teeri et al. (1989) EMBO J. 8(2):343-350; Kuster et al. (1995) Plant Mol. Biol. 29(4):759-772 (the VfENOD-GRP3 gene promoter); and, Capana et al. (1994) Plant Mol. Biol. 25(4):681-691 (rolB promoter). See also U.S. Pat. Nos. 5,837,876; 5,750,386; 5,633,363; 5,459,252; 5,401,836; 5,110,732; and 5,023,179.

[0081] “Seed-preferred” promoters include both “seed-specific” promoters (those promoters active during seed development such as promoters of seed storage proteins) as well as “seed-germinating” promoters (those promoters active during seed germination). See Thompson et al. (1989) BioEssays 10:108. Seed-preferred promoters include, but are not limited to, Cim1 (cytokinin-induced message); cZ19B1 (maize 19 kDa zein); milps (myo-inositol-1-phosphate synthase) (see WO 00/11177 and U.S. Pat. No. 6,225,529). Gamma-zein is an endosperm-specific promoter. Globulin 1 (Glb-1) is a representative embryo-specific promoter. For dicots, seed-specific promoters include, but are not limited to, bean β-phaseolin, napin, β-conglycinin, soybean lectin, cruciferin, and the like. For monocots, seed-specific promoters include, but are not limited to, maize 15 kDa zein, 22 kDa zein, 27 kDa zein, gamma-zein, waxy, shrunken 1, shrunken 2, Globulin 1, etc. See also WO 00/12733, where seed-preferred promoters from end1 and end2 genes are disclosed.

[0082] For expression in a bacterial host, promoters that function in bacteria are well-known in the art. Such promoters include any of the known crystal protein gene promoters, including the promoters of any of the pesticidal proteins of the invention, and promoters specific for B. thuringiensis sigma factors. Alternatively, mutagenized or recombinant crystal protein-encoding gene promoters may be recombinantly engineered and used to promote expression of the novel gene segments disclosed herein.

[0083] The expression cassette can also comprise a selectable marker gene for the selection of transformed cells. Selectable marker genes are utilized for the selection of transformed cells or tissues. Marker genes include genes encoding antibiotic resistance, such as those encoding neomycin phosphotransferase II (NEO) and hygromycin phosphotransferase (HPT), as well as genes conferring resistance to herbicidal compounds, such as glufosinate ammonium, bromoxynil, imidazolinones, and 2,4-dichlorophenoxyacetate (2,4-D). Additional selectable markers are known and any can be used. See, for example, U.S. Provisional application 62/094,697, filed on Dec. 19, 2014, and U.S. Provisional Application 62/189,505, filed Jul. 7, 2015, both of which are herein incorporated by reference in their entirety, which discloses glufosinate resistance sequences that can be employed as selectable markers. See, for example, PCT/US2015/066648, filed on Dec. 18, 2015, herein incorporated by reference in its entirety, which discloses glufosinate resistance sequences that can be employed as selectable markers.

### IV. Methods, Host Cells and Plant Cells

[0084] As indicated, DNA constructs comprising nucleotide sequences encoding the pesticidal proteins or active variants or fragment thereof can be used to transform plants of interest or other organisms of interest. Methods for transformation involve introducing a nucleotide construct into a plant. By “introducing” is intended to introduce the nucleotide construct to the plant or other host cell in such a manner that the construct gains access to the interior of a cell of the plant or host cell. The methods of the invention do not require a particular method for introducing a nucleotide construct to a plant or host cell, only that the nucleotide construct gains access to the interior of at least one cell of the plant or the host organism. Methods for introducing nucleotide constructs into plants and other host cells are known in the art including, but not limited to, stable transformation methods, transient transformation methods, and virus-mediated methods.

[0085] The methods result in a transformed organisms, such as a plant, including whole plants, as well as plant organs (e.g., leaves, stems, roots, etc.), seeds, plant cells, propagules, embryos and progeny of the same. Plant cells can be differentiated or undifferentiated (e.g. callus, suspension culture cells, protoplasts, leaf cells, root cells, phloem cells, pollen).

[0086] “Transgenic plants” or “transformed plants” or “stably transformed” plants or cells or tissues refers to plants that have incorporated or integrated a polynucleotide encoding at least one pesticidal polypeptide of the invention. It is recognized that other exogenous or endogenous nucleic acid sequences or DNA fragments may also be incorporated into the plant cell. Agrobacterium- and biolistic-mediated transformation remain the two predominantly employed approaches. However, transformation may be performed by infection, transfection, microinjection, electroporation, microprojection, biolistics or particle bombardment, electroporation, silica/carbon fibers, ultrasound mediated, PEG mediated, calcium phosphate co-precipitation, polycation DMSO technique, DEAE dextran procedure, Agro and viral mediated(Caulimoriviruses, Geminiviruses, RNA plant viruses), liposome mediated and the like.

[0087] Transformation protocols as well as protocols for introducing polypeptides or polynucleotide sequences into plants may vary depending on the type of plant or plant cell, i.e., monocot or dicot, targeted for transformation. Methods for transformation are known in the art and include those set forth in U.S. Pat. Nos. 8,575,425; 7,692,068; 8,802,934; 7,541,517; each of which is herein incorporated by reference. See, also, Rakoczy-Trojanowska, M. (2002) Cell Mol Biol Lett. 7:849-858; Jones et al. (2005) Plant Methods 1:5; Rivera et al. (2012) Physics of Life Reviews 9:308-345; Bartlett et al. (2008) Plant Methods 4:1-12; Bates, G. W. (1999) Methods in Molecular Biology 111:359-366; Binns and Thomashow (1988) Annual Reviews in Microbiology 42:575-606; Christou, P. (1992) The Plant Journal 2:275-281; Christou, P. (1995) Euphytica 85:13-27; Tzfira et al. (2004) TRENDS in Genetics 20:375-383; Yao et al. (2006) Journal of Experimental Botany 57:3737-3746; Zupan and Zambryski (1995) Plant Physiology 107:1041-1047; Jones et al. (2005) Plant Methods 1:5;

[0088] Transformation may result in stable or transient incorporation of the nucleic acid into the cell. “Stable transformation” is intended to mean that the nucleotide construct introduced into a host cell integrates into the genome of the host cell and is capable of being inherited by the progeny thereof. “Transient transformation” is intended to mean that a polynucleotide is introduced into the host cell and does not integrate into the genome of the host cell.

[0089] Methods for transformation of chloroplasts are known in the art. See, for example, Svab et al. (1990) Proc. Nail. Acad. Sci. USA 87:8526-8530; Svab and Maliga (1993) Proc. Natl. Acad. Sci. USA 90:913-917; Svab and Maliga (1993) EMBO J. 12:601-606. The method relies on particle gun delivery of DNA containing a selectable marker and targeting of the DNA to the plastid genome through homologous recombination. Additionally, plastid transformation can be accomplished by transactivation of a silent plastid-borne transgene by tissue-preferred expression of a nuclear-encoded and plastid-directed RNA polymerase. Such a system has been reported in McBride et al. (1994) Proc. Natl. Acad. Sci. USA 91:7301-7305.

[0090] The cells that have been transformed may be grown into plants in accordance with conventional ways. See, for example, McCormick et al. (1986) Plant Cell Reports 5:81-84. These plants may then be grown, and either pollinated with the same transformed strain or different strains, and the resulting hybrid having constitutive expression of the desired phenotypic characteristic identified. Two or more generations may be grown to ensure that expression of the desired phenotypic characteristic is stably maintained and inherited and then seeds harvested to ensure expression of the desired phenotypic characteristic has been achieved. In this manner, the present invention provides transformed seed (also referred to as “transgenic seed”) having a nucleotide construct of the invention, for example, an expression cassette of the invention, stably incorporated into their genome.

[0091] In specific embodiments, the sequences provide herein can be targeted to specific cite within the genome of the host cell or plant cell. Such methods include, but are not limited to, meganucleases designed against the plant genomic sequence of interest (D'Halluin et al. 2013 Plant Biotechnol J); CRISPR-Cas9, TALENs, and other technologies for precise editing of genomes (Feng, et al. Cell Research 23:1229-1232, 2013, Podevin, et al. Trends Biotechnology, online publication, 2013, Wei et al., J Gen Genomics, 2013, Zhang et al (2013) WO 2013/026740); Cre-lox site-specific recombination (Dale et al. (1995) Plant J 7:649-659; Lyznik, et al. (2007) Transgenic Plant J 1:1-9; FLP-FRT recombination (Li et al. (2009) Plant Physiol 151:1087-1095); Bxbl-mediated integration (Yau et al. Plant J (2011) 701:147-166); zinc-finger mediated integration (Wright et al. (2005) Plant J 44:693-705); Cal et al. (2009) Plant Mol Biol 69:699-709); and homologous recombination (Lieberman-Lazarovich and Levy (2011) Methods Mol Biol 701: 51-65); Puchta (2002) Plant Mol Biol 48:173-182).

[0092] The sequence provided herein may be used for transformation of any plant species, including, but not limited to, monocots and dicots. Examples of plants of interest include, but are not limited to, corn (maize), sorghum, wheat, sunflower, tomato, crucifers, peppers, potato, cotton, rice, soybean, sugarbeet, sugarcane, tobacco, barley, and oilseed rape, Brassica sp., alfalfa, rye, millet, safflower, peanuts, sweet potato, cassaya, coffee, coconut, pineapple, citrus trees, cocoa, tea, banana, avocado, fig, guava, mango, olive, papaya, cashew, macadamia, almond, oats, vegetables, ornamentals, and conifers.

[0093] Vegetables include, but are not limited to, tomatoes, lettuce, green beans, lima beans, peas, and members of the genus Curcumis such as cucumber, cantaloupe, and musk melon. Ornamentals include, but are not limited to, azalea, hydrangea, hibiscus, roses, tulips, daffodils, petunias, carnation, poinsettia, and chrysanthemum. Preferably, plants of the present invention are crop plants (for example, maize, sorghum, wheat, sunflower, tomato, crucifers, peppers, potato, cotton, rice, soybean, sugarbeet, sugarcane, tobacco, barley, oilseed rape, etc.).

[0094] As used herein, the term plant includes plant cells, plant protoplasts, plant cell tissue cultures from which plants can be regenerated, plant calli, plant clumps, and plant cells that are intact in plants or parts of plants such as embryos, pollen, ovules, seeds, leaves, flowers, branches, fruit, kernels, ears, cobs, husks, stalks, roots, root tips, anthers, and the like. Grain is intended to mean the mature seed produced by commercial growers for purposes other than growing or reproducing the species. Progeny, variants, and mutants of the regenerated plants are also included within the scope of the invention, provided that these parts comprise the introduced polynucleotides. Further provided is a processed plant product or byproduct that retains the sequences disclosed herein, including for example, soymeal.

[0095] In another embodiment, the genes encoding the pesticidal proteins can be used to transform insect pathogenic organisms. Such organisms include baculoviruses, fungi, protozoa, bacteria, and nematodes. Microorganism hosts that are known to occupy the “phytosphere” (phylloplane, phyllosphere, rhizosphere, and/or rhizoplana) of one or more crops of interest may be selected. These microorganisms are selected so as to be capable of successfully competing in the particular environment with the wild-type microorganisms, provide for stable maintenance and expression of the gene expressing the pesticidal protein, and desirably, provide for improved protection of the pesticide from environmental degradation and inactivation.

[0096] Such microorganisms include archaea, bacteria, algae, and fungi. Of particular interest are microorganisms such as bacteria, e.g., Bacillus, Pseudomonas, Erwinia, Serratia, Klebsiella, Xanthomonas, Streptomyces, Rhizobium, Rhodopseudomonas, Methylius, Agrobacterium, Acetobacter, Lactobacillus, Arthrobacter, Azotobacter, Leuconostoc, and Alcaligenes. Fungi include yeast, e.g., Saccharomyces, Cryptococcus, Kluyveromyces, Sporobolomyces, Rhodotorula, and Aureobasidium. Of particular interest are such phytosphere bacterial species as Pseudomonas syringae, Pseudomonas aeruginosa, Pseudomonas fluorescens, Serratia marcescens, Acetobacter xylinum, Agrobacteria, Rhodopseudomonas spheroides, Xanthomonas campestris, Rhizobium melioti, Alcaligenes entrophus, Clavibacter xyli and Azotobacter vinlandir and phytosphere yeast species such as Rhodotorula rubra, R. glutinis, R. marina, R. aurantiaca, Cryptococcus albidus, C. diffluens, C. laurentii, Saccharomyces rosei, S. pretoriensis, S. cerevisiae, Sporobolomyces rosues, S. odorus, Kluyveromyces veronae, Aureobasidium pollulans, Bacillus thuringiensis, Escherichia coli, Bacillus subtilis, and the like.

[0097] Illustrative prokaryotes, both Gram-negative and gram-positive, include Enterobacteriaceae, such as Escherichia, Erwinia, Shigella, Salmonella, and Proteus; Bacillaceae; Rhizobiceae, such as Rhizobium; Spirillaceae, such as photobacterium, Zymomonas, Serratia, Aeromonas, Vibrio, Desulfovibrio, Spirillum; Lactobacillaceae; Pseudomonadaceae, such as Pseudomonas and Acetobacter; Azotobacteraceae and Nitrobacteraceae. Fungi include Phycomycetes and Ascomycetes, e.g., yeast, such as Saccharomyces and Schizosaccharomyces; and Basidiomycetes yeast, such as Rhodotorula, Aureobasidium, Sporobolomyces, and the like.

[0098] Genes encoding pesticidal proteins can be introduced by means of electrotransformation, PEG induced transformation, heat shock, transduction, conjugation, and the like. Specifically, genes encoding the pesticidal proteins can be cloned into a shuttle vector, for example, pHT3101 (Lerecius et al. (1989) FEMS Microbiol. Letts. 60: 211-218. The shuttle vector pHT3101 containing the coding sequence for the particular pesticidal protein gene can, for example, be transformed into the root-colonizing Bacillus by means of electroporation (Lerecius et al. (1989) FEMS Microbiol. Letts. 60: 211-218).

[0099] Expression systems can be designed so that pesticidal proteins are secreted outside the cytoplasm of gram-negative bacteria by fusing an appropriate signal peptide to the amino-terminal end of the pesticidal protein. Signal peptides recognized by E. coli include the OmpA protein (Ghrayeb et al. (1984) EMBO J, 3: 2437-2442).

[0100] Pesticidal proteins and active variants thereof can be fermented in a bacterial host and the resulting bacteria processed and used as a microbial spray in the same manner that Bacillus thuringiensis strains have been used as insecticidal sprays. In the case of a pesticidal protein(s) that is secreted from Bacillus, the secretion signal is removed or mutated using procedures known in the art. Such mutations and/or deletions prevent secretion of the pesticidal protein(s) into the growth medium during the fermentation process. The pesticidal proteins are retained within the cell, and the cells are then processed to yield the encapsulated pesticidal proteins.

[0101] Alternatively, the pesticidal proteins are produced by introducing heterologous genes into a cellular host. Expression of the heterologous gene results, directly or indirectly, in the intracellular production and maintenance of the pesticide. These cells are then treated under conditions that prolong the activity of the toxin produced in the cell when the cell is applied to the environment of target pest(s). The resulting product retains the toxicity of the toxin. These naturally encapsulated pesticidal proteins may then be formulated in accordance with conventional techniques for application to the environment hosting a target pest, e.g., soil, water, and foliage of plants. See, for example U.S. Pat. No. 6,468,523 and U.S. Publication No. 20050138685, and the references cited therein. In the present invention, a transformed microorganism (which includes whole organisms, cells, spore(s), pesticidal protein(s), pesticidal component(s), pest-impacting component(s), mutant(s), living or dead cells and cell components, including mixtures of living and dead cells and cell components, and including broken cells and cell components) or an isolated pesticidal protein can be formulated with an acceptable carrier into a pesticidal or agricultural composition(s) that is, for example, a suspension, a solution, an emulsion, a dusting powder, a dispersible granule, a wettable powder, and an emulsifiable concentrate, an aerosol, an impregnated granule, an adjuvant, a coatable paste, and also encapsulations in, for example, polymer substances.

[0102] Agricultural compositions may comprise a polypeptide, a recombinogenic polypeptide or a variant or fragment thereof, as disclosed herein. The agricultural composition disclosed herein may be applied to the environment of a plant or an area of cultivation, or applied to the plant, plant part, plant cell, or seed.

[0103] Such compositions disclosed above may be obtained by the addition of a surface-active agent, an inert carrier, a preservative, a humectant, a feeding stimulant, an attractant, an encapsulating agent, a binder, an emulsifier, a dye, a UV protectant, a buffer, a flow agent or fertilizers, micronutrient donors, or other preparations that influence plant growth. One or more agrochemicals including, but not limited to, herbicides, insecticides, fungicides, bactericides, nematicides, molluscicides, acaracides, plant growth regulators, harvest aids, and fertilizers, can be combined with carriers, surfactants or adjuvants customarily employed in the art of formulation or other components to facilitate product handling and application for particular target pests. Suitable carriers and adjuvants can be solid or liquid and correspond to the substances ordinarily employed in formulation technology, e.g., natural or regenerated mineral substances, solvents, dispersants, wetting agents, tackifiers, binders, or fertilizers. The active ingredients of the present invention are normally applied in the form of compositions and can be applied to the crop area, plant, or seed to be treated. For example, the compositions of the present invention may be applied to grain in preparation for or during storage in a grain bin or silo, etc. The compositions of the present invention may be applied simultaneously or in succession with other compounds. Methods of applying an active ingredient of the present invention or an agrochemical composition of the present invention that contains at least one of the pesticidal proteins produced by the bacterial strains of the present invention include, but are not limited to, foliar application, seed coating, and soil application. The number of applications and the rate of application depend on the intensity of infestation by the corresponding pest.

[0104] Suitable surface-active agents include, but are not limited to, anionic compounds such as a carboxylate of, for example, a metal; a carboxylate of a long chain fatty acid; an N-acylsarcosinate; mono or di-esters of phosphoric acid with fatty alcohol ethoxylates or salts of such esters; fatty alcohol sulfates such as sodium dodecyl sulfate, sodium octadecyl sulfate or sodium cetyl sulfate; ethoxylated fatty alcohol sulfates; ethoxylated alkylphenol sulfates; lignin sulfonates; petroleum sulfonates; alkyl aryl sulfonates such as alkyl-benzene sulfonates or lower alkylnaphtalene sulfonates, e.g., butyl-naphthalene sulfonate; salts of sulfonated naphthalene-formaldehyde condensates; salts of sulfonated phenol-formaldehyde condensates; more complex sulfonates such as the amide sulfonates, e.g., the sulfonated condensation product of oleic acid and N-methyl taurine; or the dialkyl sulfosuccinates, e.g., the sodium sulfonate of dioctyl succinate. Non-ionic agents include condensation products of fatty acid esters, fatty alcohols, fatty acid amides or fatty-alkyl- or alkenyl-substituted phenols with ethylene oxide, fatty esters of polyhydric alcohol ethers, e.g., sorbitan fatty acid esters, condensation products of such esters with ethylene oxide, e.g., polyoxyethylene sorbitar fatty acid esters, block copolymers of ethylene oxide and propylene oxide, acetylenic glycols such as 2,4,7,9-tetraethyl-5-decyn-4,7-diol, or ethoxylated acetylenic glycols. Examples of a cationic surface-active agent include, for instance, an aliphatic mono-, di-, or polyamine such as an acetate, naphthenate or oleate; or oxygen-containing amine such as an amine oxide of polyoxyethylene alkylamine; an amide-linked amine prepared by the condensation of a carboxylic acid with a di- or polyamine; or a quaternary ammonium salt.

[0105] Examples of inert materials include but are not limited to inorganic minerals such as kaolin, phyllosilicates, carbonates, sulfates, phosphates, or botanical materials such as cork, powdered corncobs, peanut hulls, rice hulls, and walnut shells.

[0106] The compositions of the present invention can be in a suitable form for direct application or as a concentrate of primary composition that requires dilution with a suitable quantity of water or other diluant before application. The pesticidal concentration will vary depending upon the nature of the particular formulation, specifically, whether it is a concentrate or to be used directly. The composition contains 1 to 98% of a solid or liquid inert carrier, and 0 to 50% or 0.1 to 50% of a surfactant. These compositions will be administered at the labeled rate for the commercial product, for example, about 0.01 lb-5.0 lb. per acre when in dry form and at about 0.01 pts.-10 pts. per acre when in liquid form.

[0107] In a further embodiment, the compositions, as well as the transformed microorganisms and pesticidal proteins, provided herein can be treated prior to formulation to prolong the pesticidal activity when applied to the environment of a target pest as long as the pretreatment is not deleterious to the pesticidal activity. Such treatment can be by chemical and/or physical means as long as the treatment does not deleteriously affect the properties of the composition(s). Examples of chemical reagents include but are not limited to halogenating agents; aldehydes such as formaldehyde and glutaraldehyde; anti-infectives, such as zephiran chloride; alcohols, such as isopropanol and ethanol; and histological fixatives, such as Bouin's fixative and Helly's fixative (see, for example, Humason (1967) Animal Tissue Techniques (W.H. Freeman and Co.).

[0108] In one aspect, pests may be killed or reduced in numbers in a given area by application of the pesticidal proteins provided herein to the area. Alternatively, the pesticidal proteins may be prophylactically applied to an environmental area to prevent infestation by a susceptible pest. Preferably the pest ingests, or is contacted with, a pesticidally-effective amount of the polypeptide. By “pesticidally-effective amount” is intended an amount of the pesticide that is able to bring about death to at least one pest, or to noticeably reduce pest growth, feeding, or normal physiological development. This amount will vary depending on such factors as, for example, the specific target pests to be controlled, the specific environment, location, plant, crop, or agricultural site to be treated, the environmental conditions, and the method, rate, concentration, stability, and quantity of application of the pesticidally-effective polypeptide composition. The formulations or compositions may also vary with respect to climatic conditions, environmental considerations, and/or frequency of application and/or severity of pest infestation.

[0109] The active ingredients are normally applied in the form of compositions and can be applied to the crop area, plant, or seed to be treated. Methods are therefore provided for providing to a plant, plant cell, seed, plant part or an area of cultivation, an effective amount of the agricultural composition comprising the polypeptide, recombinogenic polypeptide or an active variant or fragment thereof. By “effective amount” is intended an amount of a protein or composition has pesticidal activity that is sufficient to kill or control the pest or result in a noticeable reduction in pest growth, feeding, or normal physiological development. Such decreases in numbers, pest growth, feeding or normal development can comprise any statistically significant decrease, including, for example a decrease of about 5%, 10%, 15%, 20%, 25%, 30%, 35%, 40%, 45%, 50%, 55%, 60%, 65%, 70%, 75%, 85%, 90%, 95% or greater.

[0110] For example, the compositions may be applied to grain in preparation for or during storage in a grain bin or silo, etc. The compositions may be applied simultaneously or in succession with other compounds. Methods of applying an active ingredient or an agrochemical composition comprising at least one of the polypeptides, recombinogenic polypeptides or variants or fragments thereof as disclosed herein, include but are not limited to, foliar application, seed coating, and soil application.

[0111] Methods for increasing plant yield are provided. The methods comprise providing a plant or plant cell expressing a polynucleotide encoding the pesticidal polypeptide sequence disclosed herein and growing the plant or a seed thereof in a field infested with (or susceptible to infestation by) a pest against which said polypeptide has pesticidal activity. In some embodiments, the polypeptide has pesticidal activity against a lepidopteran, coleopteran, dipteran, hemipteran, or nematode pest, and said field is infested with a lepidopteran, hemipteran, coleopteran, dipteran, or nematode pest. As defined herein, the “yield” of the plant refers to the quality and/or quantity of biomass produced by the plant. By “biomass” is intended any measured plant product. An increase in biomass production is any improvement in the yield of the measured plant product. Increasing plant yield has several commercial applications. For example, increasing plant leaf biomass may increase the yield of leafy vegetables for human or animal consumption. Additionally, increasing leaf biomass can be used to increase production of plant-derived pharmaceutical or industrial products. An increase in yield can comprise any statistically significant increase including, but not limited to, at least a 1% increase, at least a 3% increase, at least a 5% increase, at least a 10% increase, at least a 20% increase, at least a 30%, at least a 50%, at least a 70%, at least a 100% or a greater increase in yield compared to a plant not expressing the pesticidal sequence. In specific methods, plant yield is increased as a result of improved pest resistance of a plant expressing a pesticidal protein disclosed herein. Expression of the pesticidal protein results in a reduced ability of a pest to infest or feed.

[0112] The plants can also be treated with one or more chemical compositions, including one or more herbicide, insecticides, or fungicides.

[0113] Non-limiting embodiments include:

[0114] 1. An isolated polypeptide having insecticidal activity, comprising

[0115] (a) a polypeptide comprising an amino acid sequence selected from the group consisting of sequences set forth in SEQ ID NO: 1, 2, 3, 4, 5, 6, 7, 8, 9, 10, 11, 12, 13, 14, 15, 16, 17, 18, 19, 20, 21, 22, 23, 24, 25, 26, 27, 28, 29, 30, 31, 32, 33, 34, 35, 36, 37, 38, 39, 40, 41, 42, 43, 44, 45, 46, 47, 48, 49, 50, 51, 52, 53, 54, 55, 56, 57, 58, 59, 60, 61, 62, 63, 64, 65, 66, 67, 68, 69, 70, 71, 72, 73, 74, 75, 76, 77, 78, 79, 80, 81, 82, 83, 84, 85, 86, 87, 88, 89, 90, 91, 92, 93, 94, 95, 96, 97, 98, 99, 100, 101, 102, 103, 104, 105, 106, 107, 108, 109, 110, 111, 112, 113, 114, 115, 116, 117, 118, 119, 120, 121, 122, 123, 124, 125, 126, 127, 128, 129, 130, 131, 132, 133, 134, 135, 136, 137, 138, 139, 140, 141, 142, 143, 144, 145, 146, 147, 148, 149, 150, 151, 152, 153, 154, 155, 156, 157, 158, 159, 160, 161, 162, 163, 164, 165, 166, 167, 168, 169, 170, 171, 172, 173, 174, 175, 176, 177, 178, 179, 180, 181, 182, 183, 184, 185, 186, 187, 188, 189, 190, 191, 192, 193, 194, 195, 196, 197, 198, 199, 200, 201, 202, 203, 204, 205, 206, 207, 208, 209, 210, 211, 212, 213, 214, 215, 216, 217, 218, 219, 220, 221, 222, 223, 224, 225, 226, 227, 228, 229, 230, 231, 232, 233, 234, 235, 236, 237, 238, 239, 240, 241, 242, 243, 244, 245, 246, 247, 248, 249, 250, 251, 252, 253, 254, 255, 256, 257, 258, 259, 260, 261, 262, 263, 264, 265, 266, 267, 268, 269, 270, 271, 272, 273, 274, 275, 276, 277, 278, 279, 280, 281, 282, 283, 284, 285, 286, 287, 288, 289, 290, 291, 292, 293, 294, 295, 296, 297, 298, 299, 300, 301, 302, 303, 304, 305, 306, 307, 308, 309, 310, 311, 312, 313, 314, 315, 316, 317, 318, 319, 320, 321, 322, 323, 324, 325, 326, 327, 328, 329, 330, 331, 332, 333, 334, 335, 336, 337, 338, 339, 340, 341, 342, 343, 344, 345, 346, 347, 348, 349, 350, 351, 352, 353, 354, 355, 356, 357, 358, 359, 360, 361, 362, 363, 364, 365, 366, 367, 368, 369, 370, 371, 372, 373, 374, 375, 376, 377, 378, 379, 380, 381, 382, 383, 384, 385, 386, 387, 388, 389, 390, 391, 392, 393, 394, 395, 396, 397, 398, 399, 400, 401, 402, 403, 404, 405, 406, 407, 408, 409, 410, 411, 412, 413, 414, 415, 416, 417, 418, 419, 420, 421, 422, 423, 424, 425, 426, 427, 428, 429, 430, 431, 432, 433, 434, 435, 436, 437, 438, 439, 440, 441, 442, 443, 444, 445, 446, 447, 448, 449, 450, 451, 452, 453, 454, 455, 456, 457, and/or 458; or

[0116] (b) a polypeptide comprising an amino acid sequence having at least the percent sequence identity set forth in Table 1 to an amino acid sequence selected from the group consisting of sequences set forth in SEQ ID NOs: 1, 2, 3, 4, 5, 6, 7, 8, 9, 10, 11, 12, 13, 14, 15, 16, 17, 18, 19, 20, 21, 22, 23, 24, 25, 26, 27, 28, 29, 30, 31, 32, 33, 34, 35, 36, 37, 38, 39, 40, 41, 42, 43, 44, 45, 46, 47, 48, 49, 50, 51, 52, 53, 54, 55, 56, 57, 58, 59, 60, 61, 62, 63, 64, 65, 66, 67, 68, 69, 70, 71, 72, 73, 74, 75, 76, 77, 78, 79, 80, 81, 82, 83, 84, 85, 86, 87, 88, 89, 90, 91, 92, 93, 94, 95, 96, 97, 98, 99, 100, 101, 102, 103, 104, 105, 106, 107, 108, 109, 110, 111, 112, 113, 114, 115, 116, 117, 118, 119, 120, 121, 122, 123, 124, 125, 126, 127, 128, 129, 130, 131, 132, 133, 134, 135, 136, 137, 138, 139, 140, 141, 142, 143, 144, 145, 146, 147, 148, 149, 150, 151, 152, 153, 154, 155, 156, 157, 158, 159, 160, 161, 162, 163, 164, 165, 166, 167, 168, 169, 170, 171, 172, 173, 174, 175, 176, 177, 178, 179, 180, 181, 182, 183, 184, 185, 186, 187, 188, 189, 190, 191, 192, 193, 194, 195, 196, 197, 198, 199, 200, 201, 202, 203, 204, 205, 206, 207, 208, 209, 210, 211, 212, 213, 214, 215, 216, 217, 218, 219, 220, 221, 222, 223, 224, 225, 226, 227, 228, 229, 230, 231, 232, 233, 234, 235, 236, 237, 238, 239, 240, 241, 242, 243, 244, 245, 246, 247, 248, 249, 250, 251, 252, 253, 254, 255, 256, 257, 258, 259, 260, 261, 262, 263, 264, 265, 266, 267, 268, 269, 270, 271, 272, 273, 274, 275, 276, 277, 278, 279, 280, 281, 282, 283, 284, 285, 286, 287, 288, 289, 290, 291, 292, 293, 294, 295, 296, 297, 298, 299, 300, 301, 302, 303, 304, 305, 306, 307, 308, 309, 310, 311, 312, 313, 314, 315, 316, 317, 318, 319, 320, 321, 322, 323, 324, 325, 326, 327, 328, 329, 330, 331, 332, 333, 334, 335, 336, 337, 338, 339, 340, 341, 342, 343, 344, 345, 346, 347, 348, 349, 350, 351, 352, 353, 354, 355, 356, 357, 358, 359, 360, 361, 362, 363, 364, 365, 366, 367, 368, 369, 370, 371, 372, 373, 374, 375, 376, 377, 378, 379, 380, 381, 382, 383, 384, 385, 386, 387, 388, 389, 390, 391, 392, 393, 394, 395, 396, 397, 398, 399, 400, 401, 402, 403, 404, 405, 406, 407, 408, 409, 410, 411, 412, 413, 414, 415, 416, 417, 418, 419, 420, 421, 422, 423, 424, 425, 426, 427, 428, 429, 430, 431, 432, 433, 434, 435, 436, 437, 438, 439, 440, 441, 442, 443, 444, 445, 446, 447, 448, 449, 450, 451, 452, 453, 454, 455, 456, 457, and/or 458.

[0117] 2. The polypeptide of embodiment 1, wherein said polypeptide comprises the amino acid sequence set forth in SEQ ID NO: 1, 2, 3, 4, 5, 6, 7, 8, 9, 10, 11, 12, 13, 14, 15, 16, 17, 18, 19, 20, 21, 22, 23, 24, 25, 26, 27, 28, 29, 30, 31, 32, 33, 34, 35, 36, 37, 38, 39, 40, 41, 42, 43, 44, 45, 46, 47, 48, 49, 50, 51, 52, 53, 54, 55, 56, 57, 58, 59, 60, 61, 62, 63, 64, 65, 66, 67, 68, 69, 70, 71, 72, 73, 74, 75, 76, 77, 78, 79, 80, 81, 82, 83, 84, 85, 86, 87, 88, 89, 90, 91, 92, 93, 94, 95, 96, 97, 98, 99, 100, 101, 102, 103, 104, 105, 106, 107, 108, 109, 110, 111, 112, 113, 114, 115, 116, 117, 118, 119, 120, 121, 122, 123, 124, 125, 126, 127, 128, 129, 130, 131, 132, 133, 134, 135, 136, 137, 138, 139, 140, 141, 142, 143, 144, 145, 146, 147, 148, 149, 150, 151, 152, 153, 154, 155, 156, 157, 158, 159, 160, 161, 162, 163, 164, 165, 166, 167, 168, 169, 170, 171, 172, 173, 174, 175, 176, 177, 178, 179, 180, 181, 182, 183, 184, 185, 186, 187, 188, 189, 190, 191, 192, 193, 194, 195, 196, 197, 198, 199, 200, 201, 202, 203, 204, 205, 206, 207, 208, 209, 210, 211, 212, 213, 214, 215, 216, 217, 218, 219, 220, 221, 222, 223, 224, 225, 226, 227, 228, 229, 230, 231, 232, 233, 234, 235, 236, 237, 238, 239, 240, 241, 242, 243, 244, 245, 246, 247, 248, 249, 250, 251, 252, 253, 254, 255, 256, 257, 258, 259, 260, 261, 262, 263, 264, 265, 266, 267, 268, 269, 270, 271, 272, 273, 274, 275, 276, 277, 278, 279, 280, 281, 282, 283, 284, 285, 286, 287, 288, 289, 290, 291, 292, 293, 294, 295, 296, 297, 298, 299, 300, 301, 302, 303, 304, 305, 306, 307, 308, 309, 310, 311, 312, 313, 314, 315, 316, 317, 318, 319, 320, 321, 322, 323, 324, 325, 326, 327, 328, 329, 330, 331, 332, 333, 334, 335, 336, 337, 338, 339, 340, 341, 342, 343, 344, 345, 346, 347, 348, 349, 350, 351, 352, 353, 354, 355, 356, 357, 358, 359, 360, 361, 362, 363, 364, 365, 366, 367, 368, 369, 370, 371, 372, 373, 374, 375, 376, 377, 378, 379, 380, 381, 382, 383, 384, 385, 386, 387, 388, 389, 390, 391, 392, 393, 394, 395, 396, 397, 398, 399, 400, 401, 402, 403, 404, 405, 406, 407, 408, 409, 410, 411, 412, 413, 414, 415, 416, 417, 418, 419, 420, 421, 422, 423, 424, 425, 426, 427, 428, 429, 430, 431, 432, 433, 434, 435, 436, 437, 438, 439, 440, 441, 442, 443, 444, 445, 446, 447, 448, 449, 450, 451, 452, 453, 454, 455, 456, 457, and/or 458.

[0118] 3. A composition comprising the polypeptide of embodiments 1 or 2.

[0119] 4. The polypeptide of embodiment 2, further comprising heterologous amino acid sequences.

[0120] 5. A recombinant nucleic acid molecule that encodes the polypeptide of embodiment 1, wherein said recombinant nucleic acid molecule is not the naturally occurring sequence encoding said polypeptide.

[0121] 6. The recombinant nucleic acid of embodiment 5, wherein said nucleic acid molecule is a synthetic sequence that has been designed for expression in a plant.

[0122] 7. The recombinant nucleic acid molecule of embodiment 6, wherein said nucleic acid molecule is operably linked to a promoter capable of directing expression in a plant cell.

[0123] 8. The recombinant nucleic acid molecule of embodiment 5, wherein said nucleic acid molecule is operably linked to a promoter capable of directing expression in a bacteria.

[0124] 9. A host cell that contains the recombinant nucleic acid molecule of embodiment 8.

[0125] 10. The host cell of embodiment 9, wherein said host cell is a bacterial host cell. 11. A DNA construct comprising a promoter that drives expression in a plant cell operably linked to a recombinant nucleic acid molecule comprising

[0126] (a) a nucleotide sequence that encodes a polypeptide comprising the amino acid sequence of any one of SEQ ID NOs: 1, 2, 3, 4, 5, 6, 7, 8, 9, 10, 11, 12, 13, 14, 15, 16, 17, 18, 19, 20, 21, 22, 23, 24, 25, 26, 27, 28, 29, 30, 31, 32, 33, 34, 35, 36, 37, 38, 39, 40, 41, 42, 43, 44, 45, 46, 47, 48, 49, 50, 51, 52, 53, 54, 55, 56, 57, 58, 59, 60, 61, 62, 63, 64, 65, 66, 67, 68, 69, 70, 71, 72, 73, 74, 75, 76, 77, 78, 79, 80, 81, 82, 83, 84, 85, 86, 87, 88, 89, 90, 91, 92, 93, 94, 95, 96, 97, 98, 99, 100, 101, 102, 103, 104, 105, 106, 107, 108, 109, 110, 111, 112, 113, 114, 115, 116, 117, 118, 119, 120, 121, 122, 123, 124, 125, 126, 127, 128, 129, 130, 131, 132, 133, 134, 135, 136, 137, 138, 139, 140, 141, 142, 143, 144, 145, 146, 147, 148, 149, 150, 151, 152, 153, 154, 155, 156, 157, 158, 159, 160, 161, 162, 163, 164, 165, 166, 167, 168, 169, 170, 171, 172, 173, 174, 175, 176, 177, 178, 179, 180, 181, 182, 183, 184, 185, 186, 187, 188, 189, 190, 191, 192, 193, 194, 195, 196, 197, 198, 199, 200, 201, 202, 203, 204, 205, 206, 207, 208, 209, 210, 211, 212, 213, 214, 215, 216, 217, 218, 219, 220, 221, 222, 223, 224, 225, 226, 227, 228, 229, 230, 231, 232, 233, 234, 235, 236, 237, 238, 239, 240, 241, 242, 243, 244, 245, 246, 247, 248, 249, 250, 251, 252, 253, 254, 255, 256, 257, 258, 259, 260, 261, 262, 263, 264, 265, 266, 267, 268, 269, 270, 271, 272, 273, 274, 275, 276, 277, 278, 279, 280, 281, 282, 283, 284, 285, 286, 287, 288, 289, 290, 291, 292, 293, 294, 295, 296, 297, 298, 299, 300, 301, 302, 303, 304, 305, 306, 307, 308, 309, 310, 311, 312, 313, 314, 315, 316, 317, 318, 319, 320, 321, 322, 323, 324, 325, 326, 327, 328, 329, 330, 331, 332, 333, 334, 335, 336, 337, 338, 339, 340, 341, 342, 343, 344, 345, 346, 347, 348, 349, 350, 351, 352, 353, 354, 355, 356, 357, 358, 359, 360, 361, 362, 363, 364, 365, 366, 367, 368, 369, 370, 371, 372, 373, 374, 375, 376, 377, 378, 379, 380, 381, 382, 383, 384, 385, 386, 387, 388, 389, 390, 391, 392, 393, 394, 395, 396, 397, 398, 399, 400, 401, 402, 403, 404, 405, 406, 407, 408, 409, 410, 411, 412, 413, 414, 415, 416, 417, 418, 419, 420, 421, 422, 423, 424, 425, 426, 427, 428, 429, 430, 431, 432, 433, 434, 435, 436, 437, 438, 439, 440, 441, 442, 443, 444, 445, 446, 447, 448, 449, 450, 451, 452, 453, 454, 455, 456, 457, and/or 458; or,

[0127] (b) a nucleotide sequence that encodes a polypeptide comprising an amino acid sequence having at least the percent sequence identity set forth in Table 1 to an amino acid sequence selected from the group consisting of sequences set forth in SEQ ID NOs: 1, 2, 3, 4, 5, 6, 7, 8, 9, 10, 11, 12, 13, 14, 15, 16, 17, 18, 19, 20, 21, 22, 23, 24, 25, 26, 27, 28, 29, 30, 31, 32, 33, 34, 35, 36, 37, 38, 39, 40, 41, 42, 43, 44, 45, 46, 47, 48, 49, 50, 51, 52, 53, 54, 55, 56, 57, 58, 59, 60, 61, 62, 63, 64, 65, 66, 67, 68, 69, 70, 71, 72, 73, 74, 75, 76, 77, 78, 79, 80, 81, 82, 83, 84, 85, 86, 87, 88, 89, 90, 91, 92, 93, 94, 95, 96, 97, 98, 99, 100, 101, 102, 103, 104, 105, 106, 107, 108, 109, 110, 111, 112, 113, 114, 115, 116, 117, 118, 119, 120, 121, 122, 123, 124, 125, 126, 127, 128, 129, 130, 131, 132, 133, 134, 135, 136, 137, 138, 139, 140, 141, 142, 143, 144, 145, 146, 147, 148, 149, 150, 151, 152, 153, 154, 155, 156, 157, 158, 159, 160, 161, 162, 163, 164, 165, 166, 167, 168, 169, 170, 171, 172, 173, 174, 175, 176, 177, 178, 179, 180, 181, 182, 183, 184, 185, 186, 187, 188, 189, 190, 191, 192, 193, 194, 195, 196, 197, 198, 199, 200, 201, 202, 203, 204, 205, 206, 207, 208, 209, 210, 211, 212, 213, 214, 215, 216, 217, 218, 219, 220, 221, 222, 223, 224, 225, 226, 227, 228, 229, 230, 231, 232, 233, 234, 235, 236, 237, 238, 239, 240, 241, 242, 243, 244, 245, 246, 247, 248, 249, 250, 251, 252, 253, 254, 255, 256, 257, 258, 259, 260, 261, 262, 263, 264, 265, 266, 267, 268, 269, 270, 271, 272, 273, 274, 275, 276, 277, 278, 279, 280, 281, 282, 283, 284, 285, 286, 287, 288, 289, 290, 291, 292, 293, 294, 295, 296, 297, 298, 299, 300, 301, 302, 303, 304, 305, 306, 307, 308, 309, 310, 311, 312, 313, 314, 315, 316, 317, 318, 319, 320, 321, 322, 323, 324, 325, 326, 327, 328, 329, 330, 331, 332, 333, 334, 335, 336, 337, 338, 339, 340, 341, 342, 343, 344, 345, 346, 347, 348, 349, 350, 351, 352, 353, 354, 355, 356, 357, 358, 359, 360, 361, 362, 363, 364, 365, 366, 367, 368, 369, 370, 371, 372, 373, 374, 375, 376, 377, 378, 379, 380, 381, 382, 383, 384, 385, 386, 387, 388, 389, 390, 391, 392, 393, 394, 395, 396, 397, 398, 399, 400, 401, 402, 403, 404, 405, 406, 407, 408, 409, 410, 411, 412, 413, 414, 415, 416, 417, 418, 419, 420, 421, 422, 423, 424, 425, 426, 427, 428, 429, 430, 431, 432, 433, 434, 435, 436, 437, 438, 439, 440, 441, 442, 443, 444, 445, 446, 447, 448, 449, 450, 451, 452, 453, 454, 455, 456, 457, and/or 458.

[0128] 12. The DNA construct of embodiment 11, wherein said nucleotide sequence is a synthetic DNA sequence that has been designed for expression in a plant.

[0129] 13. A vector comprising the DNA construct of embodiment 11.

[0130] 14. A host cell that contains the DNA construct of any one of embodiments 11-13.

[0131] 15. The host cell of embodiment 14, wherein the host cell is a plant cell.

[0132] 16. A transgenic plant comprising the host cell of embodiment 15.

[0133] 17. A composition comprising the host cell of embodiment 10.

[0134] 18. The composition of embodiment 17, wherein said composition is selected from the group consisting of a powder, dust, pellet, granule, spray, emulsion, colloid, and solution.

[0135] 19. The composition of embodiment 17, wherein said composition comprises from about 1% to about 99% by weight of said polypeptide.

[0136] 20. A method for controlling a pest population comprising contacting said population with a pesticidal-effective amount of the composition of embodiment 17.

[0137] 21. A method for killing a pest population comprising contacting said population with a pesticidal-effective amount of the composition of embodiment 17.

[0138] 22. A method for producing a polypeptide with pesticidal activity, comprising culturing the host cell of embodiment 9 under conditions in which the nucleic acid molecule encoding the polypeptide is expressed.

[0139] 23. A plant having stably incorporated into its genome a DNA construct comprising a nucleotide sequence that encodes a protein having pesticidal activity, wherein said nucleotide sequence comprise

[0140] (a) a nucleotide sequence that encodes a polypeptide comprising the amino acid sequence of any one of SEQ ID NOs: 1, 2, 3, 4, 5, 6, 7, 8, 9, 10, 11, 12, 13, 14, 15, 16, 17, 18, 19, 20, 21, 22, 23, 24, 25, 26, 27, 28, 29, 30, 31, 32, 33, 34, 35, 36, 37, 38, 39, 40, 41, 42, 43, 44, 45, 46, 47, 48, 49, 50, 51, 52, 53, 54, 55, 56, 57, 58, 59, 60, 61, 62, 63, 64, 65, 66, 67, 68, 69, 70, 71, 72, 73, 74, 75, 76, 77, 78, 79, 80, 81, 82, 83, 84, 85, 86, 87, 88, 89, 90, 91, 92, 93, 94, 95, 96, 97, 98, 99, 100, 101, 102, 103, 104, 105, 106, 107, 108, 109, 110, 111, 112, 113, 114, 115, 116, 117, 118, 119, 120, 121, 122, 123, 124, 125, 126, 127, 128, 129, 130, 131, 132, 133, 134, 135, 136, 137, 138, 139, 140, 141, 142, 143, 144, 145, 146, 147, 148, 149, 150, 151, 152, 153, 154, 155, 156, 157, 158, 159, 160, 161, 162, 163, 164, 165, 166, 167, 168, 169, 170, 171, 172, 173, 174, 175, 176, 177, 178, 179, 180, 181, 182, 183, 184, 185, 186, 187, 188, 189, 190, 191, 192, 193, 194, 195, 196, 197, 198, 199, 200, 201, 202, 203, 204, 205, 206, 207, 208, 209, 210, 211, 212, 213, 214, 215, 216, 217, 218, 219, 220, 221, 222, 223, 224, 225, 226, 227, 228, 229, 230, 231, 232, 233, 234, 235, 236, 237, 238, 239, 240, 241, 242, 243, 244, 245, 246, 247, 248, 249, 250, 251, 252, 253, 254, 255, 256, 257, 258, 259, 260, 261, 262, 263, 264, 265, 266, 267, 268, 269, 270, 271, 272, 273, 274, 275, 276, 277, 278, 279, 280, 281, 282, 283, 284, 285, 286, 287, 288, 289, 290, 291, 292, 293, 294, 295, 296, 297, 298, 299, 300, 301, 302, 303, 304, 305, 306, 307, 308, 309, 310, 311, 312, 313, 314, 315, 316, 317, 318, 319, 320, 321, 322, 323, 324, 325, 326, 327, 328, 329, 330, 331, 332, 333, 334, 335, 336, 337, 338, 339, 340, 341, 342, 343, 344, 345, 346, 347, 348, 349, 350, 351, 352, 353, 354, 355, 356, 357, 358, 359, 360, 361, 362, 363, 364, 365, 366, 367, 368, 369, 370, 371, 372, 373, 374, 375, 376, 377, 378, 379, 380, 381, 382, 383, 384, 385, 386, 387, 388, 389, 390, 391, 392, 393, 394, 395, 396, 397, 398, 399, 400, 401, 402, 403, 404, 405, 406, 407, 408, 409, 410, 411, 412, 413, 414, 415, 416, 417, 418, 419, 420, 421, 422, 423, 424, 425, 426, 427, 428, 429, 430, 431, 432, 433, 434, 435, 436, 437, 438, 439, 440, 441, 442, 443, 444, 445, 446, 447, 448, 449, 450, 451, 452, 453, 454, 455, 456, 457, and/or 458; or,

[0141] (b) a nucleotide sequence that encodes a polypeptide comprising an amino acid sequence having at least the percent sequence identity set forth in Table 1 to an amino acid sequence selected from the group consisting of sequences set forth in SEQ ID NOs: 1, 2, 3, 4, 5, 6, 7, 8, 9, 10, 11, 12, 13, 14, 15, 16, 17, 18, 19, 20, 21, 22, 23, 24, 25, 26, 27, 28, 29, 30, 31, 32, 33, 34, 35, 36, 37, 38, 39, 40, 41, 42, 43, 44, 45, 46, 47, 48, 49, 50, 51, 52, 53, 54, 55, 56, 57, 58, 59, 60, 61, 62, 63, 64, 65, 66, 67, 68, 69, 70, 71, 72, 73, 74, 75, 76, 77, 78, 79, 80, 81, 82, 83, 84, 85, 86, 87, 88, 89, 90, 91, 92, 93, 94, 95, 96, 97, 98, 99, 100, 101, 102, 103, 104, 105, 106, 107, 108, 109, 110, 111, 112, 113, 114, 115, 116, 117, 118, 119, 120, 121, 122, 123, 124, 125, 126, 127, 128, 129, 130, 131, 132, 133, 134, 135, 136, 137, 138, 139, 140, 141, 142, 143, 144, 145, 146, 147, 148, 149, 150, 151, 152, 153, 154, 155, 156, 157, 158, 159, 160, 161, 162, 163, 164, 165, 166, 167, 168, 169, 170, 171, 172, 173, 174, 175, 176, 177, 178, 179, 180, 181, 182, 183, 184, 185, 186, 187, 188, 189, 190, 191, 192, 193, 194, 195, 196, 197, 198, 199, 200, 201, 202, 203, 204, 205, 206, 207, 208, 209, 210, 211, 212, 213, 214, 215, 216, 217, 218, 219, 220, 221, 222, 223, 224, 225, 226, 227, 228, 229, 230, 231, 232, 233, 234, 235, 236, 237, 238, 239, 240, 241, 242, 243, 244, 245, 246, 247, 248, 249, 250, 251, 252, 253, 254, 255, 256, 257, 258, 259, 260, 261, 262, 263, 264, 265, 266, 267, 268, 269, 270, 271, 272, 273, 274, 275, 276, 277, 278, 279, 280, 281, 282, 283, 284, 285, 286, 287, 288, 289, 290, 291, 292, 293, 294, 295, 296, 297, 298, 299, 300, 301, 302, 303, 304, 305, 306, 307, 308, 309, 310, 311, 312, 313, 314, 315, 316, 317, 318, 319, 320, 321, 322, 323, 324, 325, 326, 327, 328, 329, 330, 331, 332, 333, 334, 335, 336, 337, 338, 339, 340, 341, 342, 343, 344, 345, 346, 347, 348, 349, 350, 351, 352, 353, 354, 355, 356, 357, 358, 359, 360, 361, 362, 363, 364, 365, 366, 367, 368, 369, 370, 371, 372, 373, 374, 375, 376, 377, 378, 379, 380, 381, 382, 383, 384, 385, 386, 387, 388, 389, 390, 391, 392, 393, 394, 395, 396, 397, 398, 399, 400, 401, 402, 403, 404, 405, 406, 407, 408, 409, 410, 411, 412, 413, 414, 415, 416, 417, 418, 419, 420, 421, 422, 423, 424, 425, 426, 427, 428, 429, 430, 431, 432, 433, 434, 435, 436, 437, 438, 439, 440, 441, 442, 443, 444, 445, 446, 447, 448, 449, 450, 451, 452, 453, 454, 455, 456, 457, and/or 458.

[0142] 24. A transgenic seed of the plant of embodiment 23.

[0143] 25. A method for protecting a plant from an insect pest, comprising expressing in a plant or cell thereof a nucleotide sequence that encodes a pesticidal polypeptide, wherein said nucleotide sequence comprising

[0144] (a) a nucleotide sequence that encodes a polypeptide comprising the amino acid sequence of any one of SEQ ID NOs: 1, 2, 3, 4, 5, 6, 7, 8, 9, 10, 11, 12, 13, 14, 15, 16, 17, 18, 19, 20, 21, 22, 23, 24, 25, 26, 27, 28, 29, 30, 31, 32, 33, 34, 35, 36, 37, 38, 39, 40, 41, 42, 43, 44, 45, 46, 47, 48, 49, 50, 51, 52, 53, 54, 55, 56, 57, 58, 59, 60, 61, 62, 63, 64, 65, 66, 67, 68, 69, 70, 71, 72, 73, 74, 75, 76, 77, 78, 79, 80, 81, 82, 83, 84, 85, 86, 87, 88, 89, 90, 91, 92, 93, 94, 95, 96, 97, 98, 99, 100, 101, 102, 103, 104, 105, 106, 107, 108, 109, 110, 111, 112, 113, 114, 115, 116, 117, 118, 119, 120, 121, 122, 123, 124, 125, 126, 127, 128, 129, 130, 131, 132, 133, 134, 135, 136, 137, 138, 139, 140, 141, 142, 143, 144, 145, 146, 147, 148, 149, 150, 151, 152, 153, 154, 155, 156, 157, 158, 159, 160, 161, 162, 163, 164, 165, 166, 167, 168, 169, 170, 171, 172, 173, 174, 175, 176, 177, 178, 179, 180, 181, 182, 183, 184, 185, 186, 187, 188, 189, 190, 191, 192, 193, 194, 195, 196, 197, 198, 199, 200, 201, 202, 203, 204, 205, 206, 207, 208, 209, 210, 211, 212, 213, 214, 215, 216, 217, 218, 219, 220, 221, 222, 223, 224, 225, 226, 227, 228, 229, 230, 231, 232, 233, 234, 235, 236, 237, 238, 239, 240, 241, 242, 243, 244, 245, 246, 247, 248, 249, 250, 251, 252, 253, 254, 255, 256, 257, 258, 259, 260, 261, 262, 263, 264, 265, 266, 267, 268, 269, 270, 271, 272, 273, 274, 275, 276, 277, 278, 279, 280, 281, 282, 283, 284, 285, 286, 287, 288, 289, 290, 291, 292, 293, 294, 295, 296, 297, 298, 299, 300, 301, 302, 303, 304, 305, 306, 307, 308, 309, 310, 311, 312, 313, 314, 315, 316, 317, 318, 319, 320, 321, 322, 323, 324, 325, 326, 327, 328, 329, 330, 331, 332, 333, 334, 335, 336, 337, 338, 339, 340, 341, 342, 343, 344, 345, 346, 347, 348, 349, 350, 351, 352, 353, 354, 355, 356, 357, 358, 359, 360, 361, 362, 363, 364, 365, 366, 367, 368, 369, 370, 371, 372, 373, 374, 375, 376, 377, 378, 379, 380, 381, 382, 383, 384, 385, 386, 387, 388, 389, 390, 391, 392, 393, 394, 395, 396, 397, 398, 399, 400, 401, 402, 403, 404, 405, 406, 407, 408, 409, 410, 411, 412, 413, 414, 415, 416, 417, 418, 419, 420, 421, 422, 423, 424, 425, 426, 427, 428, 429, 430, 431, 432, 433, 434, 435, 436, 437, 438, 439, 440, 441, 442, 443, 444, 445, 446, 447, 448, 449, 450, 451, 452, 453, 454, 455, 456, 457, and/or 458; or,

[0145] (b) a nucleotide sequence that encodes a polypeptide comprising an amino acid sequence having at least the percent sequence identity set forth in Table 1 to an amino acid sequence selected from the group consisting of sequences set forth in SEQ ID NOs: 1, 2, 3, 4, 5, 6, 7, 8, 9, 10, 11, 12, 13, 14, 15, 16, 17, 18, 19, 20, 21, 22, 23, 24, 25, 26, 27, 28, 29, 30, 31, 32, 33, 34, 35, 36, 37, 38, 39, 40, 41, 42, 43, 44, 45, 46, 47, 48, 49, 50, 51, 52, 53, 54, 55, 56, 57, 58, 59, 60, 61, 62, 63, 64, 65, 66, 67, 68, 69, 70, 71, 72, 73, 74, 75, 76, 77, 78, 79, 80, 81, 82, 83, 84, 85, 86, 87, 88, 89, 90, 91, 92, 93, 94, 95, 96, 97, 98, 99, 100, 101, 102, 103, 104, 105, 106, 107, 108, 109, 110, 111, 112, 113, 114, 115, 116, 117, 118, 119, 120, 121, 122, 123, 124, 125, 126, 127, 128, 129, 130, 131, 132, 133, 134, 135, 136, 137, 138, 139, 140, 141, 142, 143, 144, 145, 146, 147, 148, 149, 150, 151, 152, 153, 154, 155, 156, 157, 158, 159, 160, 161, 162, 163, 164, 165, 166, 167, 168, 169, 170, 171, 172, 173, 174, 175, 176, 177, 178, 179, 180, 181, 182, 183, 184, 185, 186, 187, 188, 189, 190, 191, 192, 193, 194, 195, 196, 197, 198, 199, 200, 201, 202, 203, 204, 205, 206, 207, 208, 209, 210, 211, 212, 213, 214, 215, 216, 217, 218, 219, 220, 221, 222, 223, 224, 225, 226, 227, 228, 229, 230, 231, 232, 233, 234, 235, 236, 237, 238, 239, 240, 241, 242, 243, 244, 245, 246, 247, 248, 249, 250, 251, 252, 253, 254, 255, 256, 257, 258, 259, 260, 261, 262, 263, 264, 265, 266, 267, 268, 269, 270, 271, 272, 273, 274, 275, 276, 277, 278, 279, 280, 281, 282, 283, 284, 285, 286, 287, 288, 289, 290, 291, 292, 293, 294, 295, 296, 297, 298, 299, 300, 301, 302, 303, 304, 305, 306, 307, 308, 309, 310, 311, 312, 313, 314, 315, 316, 317, 318, 319, 320, 321, 322, 323, 324, 325, 326, 327, 328, 329, 330, 331, 332, 333, 334, 335, 336, 337, 338, 339, 340, 341, 342, 343, 344, 345, 346, 347, 348, 349, 350, 351, 352, 353, 354, 355, 356, 357, 358, 359, 360, 361, 362, 363, 364, 365, 366, 367, 368, 369, 370, 371, 372, 373, 374, 375, 376, 377, 378, 379, 380, 381, 382, 383, 384, 385, 386, 387, 388, 389, 390, 391, 392, 393, 394, 395, 396, 397, 398, 399, 400, 401, 402, 403, 404, 405, 406, 407, 408, 409, 410, 411, 412, 413, 414, 415, 416, 417, 418, 419, 420, 421, 422, 423, 424, 425, 426, 427, 428, 429, 430, 431, 432, 433, 434, 435, 436, 437, 438, 439, 440, 441, 442, 443, 444, 445, 446, 447, 448, 449, 450, 451, 452, 453, 454, 455, 456, 457, and/or 458.

[0146] 26. The method of embodiment 25, wherein said plant produces a pesticidal polypeptide having pesticidal against a lepidopteran or coleopteran pest.

[0147] 27. A method for increasing yield in a plant comprising growing in a field a plant or seed thereof having stably incorporated into its genome a DNA construct comprising a promoter that drives expression in a plant operably linked to a nucleotide sequence that encodes a pesticidal polypeptide, wherein said nucleotide sequence comprises

[0148] (a) a nucleotide sequence that encodes a polypeptide comprising the amino acid sequence of any one of SEQ ID NOs: 1, 2, 3, 4, 5, 6, 7, 8, 9, 10, 11, 12, 13, 14, 15, 16, 17, 18, 19, 20, 21, 22, 23, 24, 25, 26, 27, 28, 29, 30, 31, 32, 33, 34, 35, 36, 37, 38, 39, 40, 41, 42, 43, 44, 45, 46, 47, 48, 49, 50, 51, 52, 53, 54, 55, 56, 57, 58, 59, 60, 61, 62, 63, 64, 65, 66, 67, 68, 69, 70, 71, 72, 73, 74, 75, 76, 77, 78, 79, 80, 81, 82, 83, 84, 85, 86, 87, 88, 89, 90, 91, 92, 93, 94, 95, 96, 97, 98, 99, 100, 101, 102, 103, 104, 105, 106, 107, 108, 109, 110, 111, 112, 113, 114, 115, 116, 117, 118, 119, 120, 121, 122, 123, 124, 125, 126, 127, 128, 129, 130, 131, 132, 133, 134, 135, 136, 137, 138, 139, 140, 141, 142, 143, 144, 145, 146, 147, 148, 149, 150, 151, 152, 153, 154, 155, 156, 157, 158, 159, 160, 161, 162, 163, 164, 165, 166, 167, 168, 169, 170, 171, 172, 173, 174, 175, 176, 177, 178, 179, 180, 181, 182, 183, 184, 185, 186, 187, 188, 189, 190, 191, 192, 193, 194, 195, 196, 197, 198, 199, 200, 201, 202, 203, 204, 205, 206, 207, 208, 209, 210, 211, 212, 213, 214, 215, 216, 217, 218, 219, 220, 221, 222, 223, 224, 225, 226, 227, 228, 229, 230, 231, 232, 233, 234, 235, 236, 237, 238, 239, 240, 241, 242, 243, 244, 245, 246, 247, 248, 249, 250, 251, 252, 253, 254, 255, 256, 257, 258, 259, 260, 261, 262, 263, 264, 265, 266, 267, 268, 269, 270, 271, 272, 273, 274, 275, 276, 277, 278, 279, 280, 281, 282, 283, 284, 285, 286, 287, 288, 289, 290, 291, 292, 293, 294, 295, 296, 297, 298, 299, 300, 301, 302, 303, 304, 305, 306, 307, 308, 309, 310, 311, 312, 313, 314, 315, 316, 317, 318, 319, 320, 321, 322, 323, 324, 325, 326, 327, 328, 329, 330, 331, 332, 333, 334, 335, 336, 337, 338, 339, 340, 341, 342, 343, 344, 345, 346, 347, 348, 349, 350, 351, 352, 353, 354, 355, 356, 357, 358, 359, 360, 361, 362, 363, 364, 365, 366, 367, 368, 369, 370, 371, 372, 373, 374, 375, 376, 377, 378, 379, 380, 381, 382, 383, 384, 385, 386, 387, 388, 389, 390, 391, 392, 393, 394, 395, 396, 397, 398, 399, 400, 401, 402, 403, 404, 405, 406, 407, 408, 409, 410, 411, 412, 413, 414, 415, 416, 417, 418, 419, 420, 421, 422, 423, 424, 425, 426, 427, 428, 429, 430, 431, 432, 433, 434, 435, 436, 437, 438, 439, 440, 441, 442, 443, 444, 445, 446, 447, 448, 449, 450, 451, 452, 453, 454, 455, 456, 457, and/or 458; or,

[0149] (b) a nucleotide sequence that encodes a polypeptide comprising an amino acid sequence having at least the percent sequence identity set forth in Table 1 to an amino acid sequence selected from the group consisting of sequences set forth in SEQ ID NOs: 1, 2, 3, 4, 5, 6, 7, 8, 9, 10, 11, 12, 13, 14, 15, 16, 17, 18, 19, 20, 21, 22, 23, 24, 25, 26, 27, 28, 29, 30, 31, 32, 33, 34, 35, 36, 37, 38, 39, 40, 41, 42, 43, 44, 45, 46, 47, 48, 49, 50, 51, 52, 53, 54, 55, 56, 57, 58, 59, 60, 61, 62, 63, 64, 65, 66, 67, 68, 69, 70, 71, 72, 73, 74, 75, 76, 77, 78, 79, 80, 81, 82, 83, 84, 85, 86, 87, 88, 89, 90, 91, 92, 93, 94, 95, 96, 97, 98, 99, 100, 101, 102, 103, 104, 105, 106, 107, 108, 109, 110, 111, 112, 113, 114, 115, 116, 117, 118, 119, 120, 121, 122, 123, 124, 125, 126, 127, 128, 129, 130, 131, 132, 133, 134, 135, 136, 137, 138, 139, 140, 141, 142, 143, 144, 145, 146, 147, 148, 149, 150, 151, 152, 153, 154, 155, 156, 157, 158, 159, 160, 161, 162, 163, 164, 165, 166, 167, 168, 169, 170, 171, 172, 173, 174, 175, 176, 177, 178, 179, 180, 181, 182, 183, 184, 185, 186, 187, 188, 189, 190, 191, 192, 193, 194, 195, 196, 197, 198, 199, 200, 201, 202, 203, 204, 205, 206, 207, 208, 209, 210, 211, 212, 213, 214, 215, 216, 217, 218, 219, 220, 221, 222, 223, 224, 225, 226, 227, 228, 229, 230, 231, 232, 233, 234, 235, 236, 237, 238, 239, 240, 241, 242, 243, 244, 245, 246, 247, 248, 249, 250, 251, 252, 253, 254, 255, 256, 257, 258, 259, 260, 261, 262, 263, 264, 265, 266, 267, 268, 269, 270, 271, 272, 273, 274, 275, 276, 277, 278, 279, 280, 281, 282, 283, 284, 285, 286, 287, 288, 289, 290, 291, 292, 293, 294, 295, 296, 297, 298, 299, 300, 301, 302, 303, 304, 305, 306, 307, 308, 309, 310, 311, 312, 313, 314, 315, 316, 317, 318, 319, 320, 321, 322, 323, 324, 325, 326, 327, 328, 329, 330, 331, 332, 333, 334, 335, 336, 337, 338, 339, 340, 341, 342, 343, 344, 345, 346, 347, 348, 349, 350, 351, 352, 353, 354, 355, 356, 357, 358, 359, 360, 361, 362, 363, 364, 365, 366, 367, 368, 369, 370, 371, 372, 373, 374, 375, 376, 377, 378, 379, 380, 381, 382, 383, 384, 385, 386, 387, 388, 389, 390, 391, 392, 393, 394, 395, 396, 397, 398, 399, 400, 401, 402, 403, 404, 405, 406, 407, 408, 409, 410, 411, 412, 413, 414, 415, 416, 417, 418, 419, 420, 421, 422, 423, 424, 425, 426, 427, 428, 429, 430, 431, 432, 433, 434, 435, 436, 437, 438, 439, 440, 441, 442, 443, 444, 445, 446, 447, 448, 449, 450, 451, 452, 453, 454, 455, 456, 457, and/or 458.

[0150] 28. A method of obtaining a polynucleotide that encodes an improved polypeptide comprising pesticidal activity is provided, wherein the improved polypeptide has at least one improved property over any one of SEQ ID NOS: 1, 2, 3, 4, 5, 6, 7, 8, 9, 10, 11, 12, 13, 14, 15, 16, 17, 18, 19, 20, 21, 22, 23, 24, 25, 26, 27, 28, 29, 30, 31, 32, 33, 34, 35, 36, 37, 38, 39, 40, 41, 42, 43, 44, 45, 46, 47, 48, 49, 50, 51, 52, 53, 54, 55, 56, 57, 58, 59, 60, 61, 62, 63, 64, 65, 66, 67, 68, 69, 70, 71, 72, 73, 74, 75, 76, 77, 78, 79, 80, 81, 82, 83, 84, 85, 86, 87, 88, 89, 90, 91, 92, 93, 94, 95, 96, 97, 98, 99, 100, 101, 102, 103, 104, 105, 106, 107, 108, 109, 110, 111, 112, 113, 114, 115, 116, 117, 118, 119, 120, 121, 122, 123, 124, 125, 126, 127, 128, 129, 130, 131, 132, 133, 134, 135, 136, 137, 138, 139, 140, 141, 142, 143, 144, 145, 146, 147, 148, 149, 150, 151, 152, 153, 154, 155, 156, 157, 158, 159, 160, 161, 162, 163, 164, 165, 166, 167, 168, 169, 170, 171, 172, 173, 174, 175, 176, 177, 178, 179, 180, 181, 182, 183, 184, 185, 186, 187, 188, 189, 190, 191, 192, 193, 194, 195, 196, 197, 198, 199, 200, 201, 202, 203, 204, 205, 206, 207, 208, 209, 210, 211, 212, 213, 214, 215, 216, 217, 218, 219, 220, 221, 222, 223, 224, 225, 226, 227, 228, 229, 230, 231, 232, 233, 234, 235, 236, 237, 238, 239, 240, 241, 242, 243, 244, 245, 246, 247, 248, 249, 250, 251, 252, 253, 254, 255, 256, 257, 258, 259, 260, 261, 262, 263, 264, 265, 266, 267, 268, 269, 270, 271, 272, 273, 274, 275, 276, 277, 278, 279, 280, 281, 282, 283, 284, 285, 286, 287, 288, 289, 290, 291, 292, 293, 294, 295, 296, 297, 298, 299, 300, 301, 302, 303, 304, 305, 306, 307, 308, 309, 310, 311, 312, 313, 314, 315, 316, 317, 318, 319, 320, 321, 322, 323, 324, 325, 326, 327, 328, 329, 330, 331, 332, 333, 334, 335, 336, 337, 338, 339, 340, 341, 342, 343, 344, 345, 346, 347, 348, 349, 350, 351, 352, 353, 354, 355, 356, 357, 358, 359, 360, 361, 362, 363, 364, 365, 366, 367, 368, 369, 370, 371, 372, 373, 374, 375, 376, 377, 378, 379, 380, 381, 382, 383, 384, 385, 386, 387, 388, 389, 390, 391, 392, 393, 394, 395, 396, 397, 398, 399, 400, 401, 402, 403, 404, 405, 406, 407, 408, 409, 410, 411, 412, 413, 414, 415, 416, 417, 418, 419, 420, 421, 422, 423, 424, 425, 426, 427, 428, 429, 430, 431, 432, 433, 434, 435, 436, 437, 438, 439, 440, 441, 442, 443, 444, 445, 446, 447, 448, 449, 450, 451, 452, 453, 454, 455, 456, 457, and/or 458 comprising:

[0151] (a) recombining a plurality of parental polynucleotides comprising SEQ ID NO: 1, 2, 3, 4, 5, 6, 7, 8, 9, 10, 11, 12, 13, 14, 15, 16, 17, 18, 19, 20, 21, 22, 23, 24, 25, 26, 27, 28, 29, 30, 31, 32, 33, 34, 35, 36, 37, 38, 39, 40, 41, 42, 43, 44, 45, 46, 47, 48, 49, 50, 51, 52, 53, 54, 55, 56, 57, 58, 59, 60, 61, 62, 63, 64, 65, 66, 67, 68, 69, 70, 71, 72, 73, 74, 75, 76, 77, 78, 79, 80, 81, 82, 83, 84, 85, 86, 87, 88, 89, 90, 91, 92, 93, 94, 95, 96, 97, 98, 99, 100, 101, 102, 103, 104, 105, 106, 107, 108, 109, 110, 111, 112, 113, 114, 115, 116, 117, 118, 119, 120, 121, 122, 123, 124, 125, 126, 127, 128, 129, 130, 131, 132, 133, 134, 135, 136, 137, 138, 139, 140, 141, 142, 143, 144, 145, 146, 147, 148, 149, 150, 151, 152, 153, 154, 155, 156, 157, 158, 159, 160, 161, 162, 163, 164, 165, 166, 167, 168, 169, 170, 171, 172, 173, 174, 175, 176, 177, 178, 179, 180, 181, 182, 183, 184, 185, 186, 187, 188, 189, 190, 191, 192, 193, 194, 195, 196, 197, 198, 199, 200, 201, 202, 203, 204, 205, 206, 207, 208, 209, 210, 211, 212, 213, 214, 215, 216, 217, 218, 219, 220, 221, 222, 223, 224, 225, 226, 227, 228, 229, 230, 231, 232, 233, 234, 235, 236, 237, 238, 239, 240, 241, 242, 243, 244, 245, 246, 247, 248, 249, 250, 251, 252, 253, 254, 255, 256, 257, 258, 259, 260, 261, 262, 263, 264, 265, 266, 267, 268, 269, 270, 271, 272, 273, 274, 275, 276, 277, 278, 279, 280, 281, 282, 283, 284, 285, 286, 287, 288, 289, 290, 291, 292, 293, 294, 295, 296, 297, 298, 299, 300, 301, 302, 303, 304, 305, 306, 307, 308, 309, 310, 311, 312, 313, 314, 315, 316, 317, 318, 319, 320, 321, 322, 323, 324, 325, 326, 327, 328, 329, 330, 331, 332, 333, 334, 335, 336, 337, 338, 339, 340, 341, 342, 343, 344, 345, 346, 347, 348, 349, 350, 351, 352, 353, 354, 355, 356, 357, 358, 359, 360, 361, 362, 363, 364, 365, 366, 367, 368, 369, 370, 371, 372, 373, 374, 375, 376, 377, 378, 379, 380, 381, 382, 383, 384, 385, 386, 387, 388, 389, 390, 391, 392, 393, 394, 395, 396, 397, 398, 399, 400, 401, 402, 403, 404, 405, 406, 407, 408, 409, 410, 411, 412, 413, 414, 415, 416, 417, 418, 419, 420, 421, 422, 423, 424, 425, 426, 427, 428, 429, 430, 431, 432, 433, 434, 435, 436, 437, 438, 439, 440, 441, 442, 443, 444, 445, 446, 447, 448, 449, 450, 451, 452, 453, 454, 455, 456, 457, and/or 458 or an active variant or fragment thereof to produce a library of recombinant polynucleotides encoding recombinant pesticidal polypeptides;

[0152] (b) screening the library to identify a recombinant polynucleotide that encodes an improved recombinant pesticidal polypeptide that has an enhanced property improved over the parental polynucleotide;

[0153] (c) recovering the recombinant polynucleotide that encodes the improved recombinant pesticidal polypeptide identified in (b); and,

[0154] (d) repeating steps (a), (b) and (c) using the recombinant polynucleotide recovered in step (c) as one of the plurality of parental polynucleotides in repeated step (a).

[0155] The following examples are offered by way of illustration and not by way of limitation.

### EXPERIMENTAL

### Example 1: Discovery of Novel Genes by Sequencing and DNA Analysis

[0156] Microbial cultures were grown in liquid culture in standard laboratory media. Cultures were grown to saturation (16 to 24 hours) before DNA preparation. DNA was extracted from bacterial cells by detergent lysis, followed by binding to a silica matrix and washing with an ethanol buffer. Purified DNA was eluted from the silica matrix with a mildly alkaline aqueous buffer.

[0157] DNA for sequencing was tested for purity and concentration by spectrophotometry. Sequencing libraries were prepared using the Nextera XT library preparation kit according to the manufacturer's protocol. Sequence data was generated on a HiSeq 2000 according to the Illumina HiSeq 2000 System User Guide protocol.

[0158] Sequencing reads were assembled into draft genomes using the CLC Bio Assembly Cell software package. Following assembly, gene calls were made by several methods and resulting gene sequences were interrogated to identify novel homologs of pesticidal genes. Novel genes were identified by BLAST, by domain composition, and by pairwise alignment versus a target set of pesticidal genes. A summary of such sequences is set forth in Table 1.

[0159] Genes identified in the homology search were amplified from bacterial DNA by PCR and cloned into bacterial expression vectors containing fused in-frame purification tags. Cloned genes were expressed in E. coli and purified by column chromatography. Purified proteins were assessed in insect diet bioassay studies to identify active proteins.

### Example 2. Heterologous Expression in E. Coli

[0160] Each open reading frame set forth in Table 3 is cloned into an E. coli expression vector containing a maltose binding protein (pMBP). The expression vector is transformed into BL21*RIPL. An LB culture supplemented with carbenicillin is inoculated with a single colony and grown overnight at 37 degrees C. using 0.5% of the overnight culture, a fresh culture is inoculated and grown to logarithmic phase at 37 degrees C. The culture is induced using 250 mM IPTG for 18 hours at 16 degrees C. The cells are pelleted and resuspended in 10 mM Tris pH7.4 and 150 mM NaCl supplemented with protease inhibitors. The protein expression is evaluated by SDS-PAGE.

### Example 3. Pesticidal Activity Against Coleopteran and Lepidoptera

[0161] Protein Expression:

[0162] Each sequence set forth in Table 3 is expressed in E. coli as described in Example 2. 400 mL of LB is inoculated and grown to an OD600 of 0.6. The culture is induced with 0.25 mM IPTG overnight at 16 C. The cells are spun down and the cell pellet is resuspended in 5 mL of buffer. The resuspension is sonicated for 2 min on ice.

[0163] Bioassay:

[0164] Fall army worm (FAW), corn ear worm (CEW), European corn borer (ECB) southwestern corn borer (SWCB) and diamond backed moth (DBM or Px) eggs are purchased from a commercial insectary (Benzon Research Inc., Carlisle, Pa.). The FAW, CEW, ECB and BCW eggs are incubated to the point that eclosion would occur within 12 hrs of the assay setup. SWCB and DBM are introduced to the assay as neonate larvae. Assays are carried out in 24-well trays containing multispecies lepidopteran diet (SOUTHLAND PRODUCTS INCORPORATED, Lake Village, Ark.). Samples of the sonicated lysate are applied to the surface of the diet (diet overlay) and allowed to evaporate and soak into the diet. For CEW, FAW, BCW, ECB and SWCB, a 125 μl of sonicated lysate is added to the diet surface and dried. For DBM, 50 μl of a 1:2 dilution of sonicated lysate was added to the diet surface. The bioassay plates are sealed with a plate sealing film vented with pin holes. The plates are incubated at 26 C at 65% RH on a 16:8 day:night cycle in a Percival for 5 days. The assays are assessed for level of mortality, growth inhibition and feeding inhibition.

[0165] For the western corn rootworm bioassay, the protein construct/lysate is evaluated in an insect bioassay by dispensing 60 μl volume on the top surface of diet in well/s of 24-well plate (Cellstar, 24-well, Greiner Bio One) and allowed to dry. Each well contains 500 μl diet (Marrone et al., 1985). Fifteen to twenty neonate larvae are introduced in each well using a fine tip paint brush and the plate is covered with membrane (Viewseal, Greiner Bio One). The bioassay is stored at ambient temperature and scored for mortality, and/or growth/feeding inhibition at day 4.

[0166] For Colorado Potato Beetle (CPB) a cork bore size No. 8 leaf disk is excised from potato leaf and is dipped in the protein construct/lysate until thoroughly wet and placed on top of filter disk (Millipore, glass fiber filter, 13 mm). Sixty μl dH₂O is added to each filter disk and placed in each well of 24-well plate (Cellstar, 24-well, Greiner Bio One). The leaf disk is allowed to dry and five to seven first instar larvae are introduced in each well using a fine tip paint brush. The plate is covered with a membrane (Viewseal, Greiner Bio One) and a small hole is punctured in each well of the membrane. The construct is evaluated with four replicates, and scored for mortality and leaf damage on day 3.

### Example 4. Pesticidal Activity Against Hemipteran

[0167] Protein Expression:

[0168] Each of the sequences set forth in Table 3 is expressed in E. coli as described in Example 2. 400 mL of LB is inoculated and grown to an OD600 of 0.6. The culture is induced with 0.25 mM IPTG overnight at 16 C. The cells are spun down and the cell pellet is re-suspended in 5 mL of buffer. The resuspension is sonicated for 2 min on ice.

[0169] Second instar SGSB are obtained from a commercial insectary (Benzon Research Inc., Carlisle, Pa.). A 50% v/v ratio of sonicated lysate sample to 20% sucrose is employed in the bioassay. Stretched parafilm is used as a feeding membrane to expose the SGSB to the diet/sample mixture. The plates are incubated at 25 C:21 C, 16:8 day:night cycle at 65% RH for 5 days.

[0170] Mortality is scored for each sample.

### Example 5. Transformation of Soybean

[0171] DNA constructs comprising each of SEQ ID NOS: 1, 2, 3, 4, 5, 6, 7, 8, 9, 10, 11, 12, 13, 14, 15, 16, 17, 18, 19, 20, 21, 22, 23, 24, 25, 26, 27, 28, 29, 30, 31, 32, 33, 34, 35, 36, 37, 38, 39, 40, 41, 42, 43, 44, 45, 46, 47, 48, 49, 50, 51, 52, 53, 54, 55, 56, 57, 58, 59, 60, 61, 62, 63, 64, 65, 66, 67, 68, 69, 70, 71, 72, 73, 74, 75, 76, 77, 78, 79, 80, 81, 82, 83, 84, 85, 86, 87, 88, 89, 90, 91, 92, 93, 94, 95, 96, 97, 98, 99, 100, 101, 102, 103, 104, 105, 106, 107, 108, 109, 110, 111, 112, 113, 114, 115, 116, 117, 118, 119, 120, 121, 122, 123, 124, 125, 126, 127, 128, 129, 130, 131, 132, 133, 134, 135, 136, 137, 138, 139, 140, 141, 142, 143, 144, 145, 146, 147, 148, 149, 150, 151, 152, 153, 154, 155, 156, 157, 158, 159, 160, 161, 162, 163, 164, 165, 166, 167, 168, 169, 170, 171, 172, 173, 174, 175, 176, 177, 178, 179, 180, 181, 182, 183, 184, 185, 186, 187, 188, 189, 190, 191, 192, 193, 194, 195, 196, 197, 198, 199, 200, 201, 202, 203, 204, 205, 206, 207, 208, 209, 210, 211, 212, 213, 214, 215, 216, 217, 218, 219, 220, 221, 222, 223, 224, 225, 226, 227, 228, 229, 230, 231, 232, 233, 234, 235, 236, 237, 238, 239, 240, 241, 242, 243, 244, 245, 246, 247, 248, 249, 250, 251, 252, 253, 254, 255, 256, 257, 258, 259, 260, 261, 262, 263, 264, 265, 266, 267, 268, 269, 270, 271, 272, 273, 274, 275, 276, 277, 278, 279, 280, 281, 282, 283, 284, 285, 286, 287, 288, 289, 290, 291, 292, 293, 294, 295, 296, 297, 298, 299, 300, 301, 302, 303, 304, 305, 306, 307, 308, 309, 310, 311, 312, 313, 314, 315, 316, 317, 318, 319, 320, 321, 322, 323, 324, 325, 326, 327, 328, 329, 330, 331, 332, 333, 334, 335, 336, 337, 338, 339, 340, 341, 342, 343, 344, 345, 346, 347, 348, 349, 350, 351, 352, 353, 354, 355, 356, 357, 358, 359, 360, 361, 362, 363, 364, 365, 366, 367, 368, 369, 370, 371, 372, 373, 374, 375, 376, 377, 378, 379, 380, 381, 382, 383, 384, 385, 386, 387, 388, 389, 390, 391, 392, 393, 394, 395, 396, 397, 398, 399, 400, 401, 402, 403, 404, 405, 406, 407, 408, 409, 410, 411, 412, 413, 414, 415, 416, 417, 418, 419, 420, 421, 422, 423, 424, 425, 426, 427, 428, 429, 430, 431, 432, 433, 434, 435, 436, 437, 438, 439, 440, 441, 442, 443, 444, 445, 446, 447, 448, 449, 450, 451, 452, 453, 454, 455, 456, 457, and/or 458 or active variants or fragments thereof operably linked to a promoter active in a plant are cloned into transformation vectors and introduced into Agrobacterium as described in U.S. Provisional Application No. 62/094,782, filed Dec. 19, 2015, herein incorporated by reference in its entirety.

[0172] Four days prior to inoculation, several loops of Agrobacterium are streaked to a fresh plate of YEP* medium supplemented with the appropriate antibiotics** (spectinomycin, chloramphenicol and kanamycin). Bacteria are grown for two days in the dark at 28 C. After two days, several loops of bacteria are transferred to 3 ml of YEP liquid medium with antibiotics in a 125 ml Erlenmeyer flask. Flasks are placed on a rotary shaker at 250 RPM at 28 C overnight. One day before inoculation, 2-3 ml of the overnight culture were transferred to 125 ml of YEP with antibiotics in a 500 ml Erlenmeyer flask. Flasks are placed on a rotary shaker at 250 RPM at 28 C overnight.

[0173] Prior to inoculation, the OD of the bacterial culture is checked at OD 620. An OD of 0.8-1.0 indicates that the culture is in log phase. The culture is centrifuged at 4000 RPM for 10 minutes in Oakridge tubes. The supernatant is discarded and the pellet is re-suspended in a volume of Soybean Infection Medium (SI) to achieve the desired OD. The cultures are held with periodic mixing until needed for inoculation.

[0174] Two or three days prior to inoculation, soybean seeds are surface sterilized using chlorine gas. In a fume hood, a petri dish with seeds is place in a bell jar with the lid off. 1.75 ml of 12 N HCl is slowly added to 100 ml of bleach in a 250 ml Erlenmeyer flask inside the bell jar. The lid is immediately placed on top of the bell jar. Seeds are allowed to sterilize for 14-16 hours (overnight). The top is removed from the bell jar and the lid of the petri dish is replaced. The petri dish with the surface sterilized is then opened in a laminar flow for around 30 minutes to disperse any remaining chlorine gas.

[0175] Seeds are imbibed with either sterile DI water or soybean infection medium (SI) for 1-2 days. Twenty to 30 seeds are covered with liquid in a 100×25 mm petri dish and incubated in the dark at 24 C. After imbibition, non-germinating seeds are discarded.

[0176] Cotyledonary explants are processed on a sterile paper plate with sterile filter paper dampened using SI medium employing the methods of U.S. Pat. No. 7,473,822, herein incorporated by reference.

[0177] Typically, 16-20 cotyledons are inoculated per treatment. The SI medium used for holding the explants is discarded and replaced with 25 ml of Agrobacterium culture (OD 620=0.8-20). After all explants are submerged, the inoculation is carried out for 30 minutes with periodic swirling of the dish. After 30 minutes, the Agrobacterium culture is removed.

[0178] Co-cultivation plates is prepared by overlaying one piece of sterile paper onto Soybean Co-cultivation Medium (SCC). Without blotting, the inoculated cotyledons is cultured adaxial side down on the filter paper. Around 20 explants can be cultured on each plate. The plates are sealed with Parafilm and cultured at 24 C and around 120 umoles m−2s−1 (in a Percival incubator) for 4-5 days.

[0179] After co-cultivation, the cotyledons are washed 3 times in 25 ml of Soybean Wash Medium with 200 mg/l of cefotaxime and timentin. The cotyledons are blotted on sterile filter paper and then transferred to Soybean Shoot Induction Medium (SSI). The nodal end of the explant is depressed slightly into the medium with distal end kept above the surface at about 45 deg. No more than 10 explants are cultured on each plate. The plates are wrapped with Micropore tape and cultured in the Percival at 24 C and around 120 umoles m−2s−1.

[0180] The explants are transferred to fresh SSI medium after 14 days. Emerging shoots from the shoot apex and cotyledonary node are discarded. Shoot induction is continued for another 14 days under the same conditions.

[0181] After 4 weeks of shoot induction, the cotyledon is separated from the nodal end and a parallel cut is made underneath the area of shoot induction (shoot pad). The area of the parallel cut is placed on Soybean Shoot Elongation Medium (SSE) and the explants cultured in the Percival at 24 C and around 120 umoles m−2s−1. This step is repeated every two weeks for up to 8 weeks as long as shoots continue to elongate.

[0182] When shoots reach a length of 2-3 cm, they are transferred to Soybean Rooting Medium (SR) in a Plantcon vessel and incubated under the same conditions for 2 weeks or until roots reach a length of around 3-4 cm. After this, plants are transferred to soil.

[0183] Note, all media mentioned for soybean transformation are found in Paz et al. (2010) Agrobacterium-mediated transformation of soybean and recovery of transgenic soybean plants; Plant Transformation Facility of Iowa State University, which is herein incorporated by reference in its entirety. (See, agron-www.agron.iastate.edu/ptf/protocol/Soybean.pdf.)

### Example 6. Transformation of Maize

[0184] Maize ears are best collected 8-12 days after pollination. Embryos are isolated from the ears, and those embryos 0.8-1.5 mm in size are preferred for use in transformation. Embryos are plated scutellum side-up on a suitable incubation media, such as DN62A5S media (3.98 g/L N6 Salts; 1 mL/L (of 1000.times. Stock) N6 Vitamins; 800 mg/L L-Asparagine; 100 mg/L Myo-inositol; 1.4 g/L L-Proline; 100 mg/L Casamino acids; 50 g/L sucrose; 1 mL/L (of 1 mg/mL Stock) 2,4-D). However, media and salts other than DN62A5S are suitable and are known in the art. Embryos are incubated overnight at 25 degree C. in the dark. However, it is not necessary per se to incubate the embryos overnight.

[0185] The resulting explants are transferred to mesh squares (30-40 per plate), transferred onto osmotic media for about 30-45 minutes, then transferred to a beaming plate (see, for example, PCT Publication No. WO/0138514 and U.S. Pat. No. 5,240,842). DNA constructs designed to express the GRG proteins of the present invention in plant cells are accelerated into plant tissue using an aerosol beam accelerator, using conditions essentially as described in PCT Publication No. WO/0138514. After beaming, embryos are incubated for about 30 min on osmotic media, and placed onto incubation media overnight at 25 degree C. in the dark. To avoid unduly damaging beamed explants, they are incubated for at least 24 hours prior to transfer to recovery media. Embryos are then spread onto recovery period media, for about 5 days, 25 degree C. in the dark, then transferred to a selection media. Explants are incubated in selection media for up to eight weeks, depending on the nature and characteristics of the particular selection utilized. After the selection period, the resulting callus is transferred to embryo maturation media, until the formation of mature somatic embryos is observed. The resulting mature somatic embryos are then placed under low light, and the process of regeneration is initiated by methods known in the art. The resulting shoots are allowed to root on rooting media, and the resulting plants are transferred to nursery pots and propagated as transgenic plants.

### Example 7. Pesticidal Activity Against Nematodes

### Heterodera Glycine's (Soybean Cyst Nematode) In-Vitro Assay.

[0186] Soybean Cyst Nematodes are dispensed into a 96 well assay plate with a total volume of 100 uls and 100 J2 per well. The protein of interest as set forth in any one of SEQ ID NOS: 1, 2, 3, 4, 5, 6, 7, 8, 9, 10, 11, 12, 13, 14, 15, 16, 17, 18, 19, 20, 21, 22, 23, 24, 25, 26, 27, 28, 29, 30, 31, 32, 33, 34, 35, 36, 37, 38, 39, 40, 41, 42, 43, 44, 45, 46, 47, 48, 49, 50, 51, 52, 53, 54, 55, 56, 57, 58, 59, 60, 61, 62, 63, 64, 65, 66, 67, 68, 69, 70, 71, 72, 73, 74, 75, 76, 77, 78, 79, 80, 81, 82, 83, 84, 85, 86, 87, 88, 89, 90, 91, 92, 93, 94, 95, 96, 97, 98, 99, 100, 101, 102, 103, 104, 105, 106, 107, 108, 109, 110, 111, 112, 113, 114, 115, 116, 117, 118, 119, 120, 121, 122, 123, 124, 125, 126, 127, 128, 129, 130, 131, 132, 133, 134, 135, 136, 137, 138, 139, 140, 141, 142, 143, 144, 145, 146, 147, 148, 149, 150, 151, 152, 153, 154, 155, 156, 157, 158, 159, 160, 161, 162, 163, 164, 165, 166, 167, 168, 169, 170, 171, 172, 173, 174, 175, 176, 177, 178, 179, 180, 181, 182, 183, 184, 185, 186, 187, 188, 189, 190, 191, 192, 193, 194, 195, 196, 197, 198, 199, 200, 201, 202, 203, 204, 205, 206, 207, 208, 209, 210, 211, 212, 213, 214, 215, 216, 217, 218, 219, 220, 221, 222, 223, 224, 225, 226, 227, 228, 229, 230, 231, 232, 233, 234, 235, 236, 237, 238, 239, 240, 241, 242, 243, 244, 245, 246, 247, 248, 249, 250, 251, 252, 253, 254, 255, 256, 257, 258, 259, 260, 261, 262, 263, 264, 265, 266, 267, 268, 269, 270, 271, 272, 273, 274, 275, 276, 277, 278, 279, 280, 281, 282, 283, 284, 285, 286, 287, 288, 289, 290, 291, 292, 293, 294, 295, 296, 297, 298, 299, 300, 301, 302, 303, 304, 305, 306, 307, 308, 309, 310, 311, 312, 313, 314, 315, 316, 317, 318, 319, 320, 321, 322, 323, 324, 325, 326, 327, 328, 329, 330, 331, 332, 333, 334, 335, 336, 337, 338, 339, 340, 341, 342, 343, 344, 345, 346, 347, 348, 349, 350, 351, 352, 353, 354, 355, 356, 357, 358, 359, 360, 361, 362, 363, 364, 365, 366, 367, 368, 369, 370, 371, 372, 373, 374, 375, 376, 377, 378, 379, 380, 381, 382, 383, 384, 385, 386, 387, 388, 389, 390, 391, 392, 393, 394, 395, 396, 397, 398, 399, 400, 401, 402, 403, 404, 405, 406, 407, 408, 409, 410, 411, 412, 413, 414, 415, 416, 417, 418, 419, 420, 421, 422, 423, 424, 425, 426, 427, 428, 429, 430, 431, 432, 433, 434, 435, 436, 437, 438, 439, 440, 441, 442, 443, 444, 445, 446, 447, 448, 449, 450, 451, 452, 453, 454, 455, 456, 457, and/or 458 is dispensed into the wells and held at room temperature for assessment. Finally the 96 well plate containing the SCN J2 is analyzed for motility. Data is reported as % inhibition as compared to the controls. Hits are defined as greater or equal to 70% inhibition.

### Heterodera Glycine's (Soybean Cyst Nematode) On-Plant Assay

[0187] Soybean plants expressing one or more of SEQ ID NO: 1-458 are generated as described elsewhere herein. A 3-week-old soybean cutting is inoculated with 5000 SCN eggs per plant. This infection is held for 70 days and then harvested for counting of SCN cyst that has developed on the plant. Data is reported as % inhibition as compared to the controls. Hits are defined as greater or equal to 90% inhibition.

Meloidogyne incognita (Root-Knot Nematode) In-Vitro Assay

[0188] Root-Knot Nematodes are dispensed into a 96 well assay plate with a total volume of 100 uls and 100 J2 per well. The protein of interest comprising any one of SEQ ID NO: 1, 2, 3, 4, 5, 6, 7, 8, 9, 10, 11, 12, 13, 14, 15, 16, 17, 18, 19, 20, 21, 22, 23, 24, 25, 26, 27, 28, 29, 30, 31, 32, 33, 34, 35, 36, 37, 38, 39, 40, 41, 42, 43, 44, 45, 46, 47, 48, 49, 50, 51, 52, 53, 54, 55, 56, 57, 58, 59, 60, 61, 62, 63, 64, 65, 66, 67, 68, 69, 70, 71, 72, 73, 74, 75, 76, 77, 78, 79, 80, 81, 82, 83, 84, 85, 86, 87, 88, 89, 90, 91, 92, 93, 94, 95, 96, 97, 98, 99, 100, 101, 102, 103, 104, 105, 106, 107, 108, 109, 110, 111, 112, 113, 114, 115, 116, 117, 118, 119, 120, 121, 122, 123, 124, 125, 126, 127, 128, 129, 130, 131, 132, 133, 134, 135, 136, 137, 138, 139, 140, 141, 142, 143, 144, 145, 146, 147, 148, 149, 150, 151, 152, 153, 154, 155, 156, 157, 158, 159, 160, 161, 162, 163, 164, 165, 166, 167, 168, 169, 170, 171, 172, 173, 174, 175, 176, 177, 178, 179, 180, 181, 182, 183, 184, 185, 186, 187, 188, 189, 190, 191, 192, 193, 194, 195, 196, 197, 198, 199, 200, 201, 202, 203, 204, 205, 206, 207, 208, 209, 210, 211, 212, 213, 214, 215, 216, 217, 218, 219, 220, 221, 222, 223, 224, 225, 226, 227, 228, 229, 230, 231, 232, 233, 234, 235, 236, 237, 238, 239, 240, 241, 242, 243, 244, 245, 246, 247, 248, 249, 250, 251, 252, 253, 254, 255, 256, 257, 258, 259, 260, 261, 262, 263, 264, 265, 266, 267, 268, 269, 270, 271, 272, 273, 274, 275, 276, 277, 278, 279, 280, 281, 282, 283, 284, 285, 286, 287, 288, 289, 290, 291, 292, 293, 294, 295, 296, 297, 298, 299, 300, 301, 302, 303, 304, 305, 306, 307, 308, 309, 310, 311, 312, 313, 314, 315, 316, 317, 318, 319, 320, 321, 322, 323, 324, 325, 326, 327, 328, 329, 330, 331, 332, 333, 334, 335, 336, 337, 338, 339, 340, 341, 342, 343, 344, 345, 346, 347, 348, 349, 350, 351, 352, 353, 354, 355, 356, 357, 358, 359, 360, 361, 362, 363, 364, 365, 366, 367, 368, 369, 370, 371, 372, 373, 374, 375, 376, 377, 378, 379, 380, 381, 382, 383, 384, 385, 386, 387, 388, 389, 390, 391, 392, 393, 394, 395, 396, 397, 398, 399, 400, 401, 402, 403, 404, 405, 406, 407, 408, 409, 410, 411, 412, 413, 414, 415, 416, 417, 418, 419, 420, 421, 422, 423, 424, 425, 426, 427, 428, 429, 430, 431, 432, 433, 434, 435, 436, 437, 438, 439, 440, 441, 442, 443, 444, 445, 446, 447, 448, 449, 450, 451, 452, 453, 454, 455, 456, 457, and/or 458 is dispensed into the wells and held at room temperature for assessment. Finally the 96 well plate containing the RKN J2 is analyzed for motility. Data is reported as % inhibition as compared to the controls. Hits are defined as greater or equal to 70% inhibition.

Meloidogyne incognita (Root-Knot Nematode) On-Plant Assay

[0189] Soybean plants expressing one or more of SEQ ID NO: 1-458 are generated as described elsewhere herein. A 3-week-old soybean is inoculated with 5000 RKN eggs per plant. This infection is held for 70 days and then harvested for counting of RKN eggs that have developed in the plant. Data is reported as % inhibition as compared to the controls. Hits are defined as greater or equal to 90% inhibition.

### Example 8. Additional Assays for Pesticidal Activity

[0190] The various polypeptides set forth in SEQ ID NO: 1, 2, 3, 4, 5, 6, 7, 8, 9, 10, 11, 12, 13, 14, 15, 16, 17, 18, 19, 20, 21, 22, 23, 24, 25, 26, 27, 28, 29, 30, 31, 32, 33, 34, 35, 36, 37, 38, 39, 40, 41, 42, 43, 44, 45, 46, 47, 48, 49, 50, 51, 52, 53, 54, 55, 56, 57, 58, 59, 60, 61, 62, 63, 64, 65, 66, 67, 68, 69, 70, 71, 72, 73, 74, 75, 76, 77, 78, 79, 80, 81, 82, 83, 84, 85, 86, 87, 88, 89, 90, 91, 92, 93, 94, 95, 96, 97, 98, 99, 100, 101, 102, 103, 104, 105, 106, 107, 108, 109, 110, 111, 112, 113, 114, 115, 116, 117, 118, 119, 120, 121, 122, 123, 124, 125, 126, 127, 128, 129, 130, 131, 132, 133, 134, 135, 136, 137, 138, 139, 140, 141, 142, 143, 144, 145, 146, 147, 148, 149, 150, 151, 152, 153, 154, 155, 156, 157, 158, 159, 160, 161, 162, 163, 164, 165, 166, 167, 168, 169, 170, 171, 172, 173, 174, 175, 176, 177, 178, 179, 180, 181, 182, 183, 184, 185, 186, 187, 188, 189, 190, 191, 192, 193, 194, 195, 196, 197, 198, 199, 200, 201, 202, 203, 204, 205, 206, 207, 208, 209, 210, 211, 212, 213, 214, 215, 216, 217, 218, 219, 220, 221, 222, 223, 224, 225, 226, 227, 228, 229, 230, 231, 232, 233, 234, 235, 236, 237, 238, 239, 240, 241, 242, 243, 244, 245, 246, 247, 248, 249, 250, 251, 252, 253, 254, 255, 256, 257, 258, 259, 260, 261, 262, 263, 264, 265, 266, 267, 268, 269, 270, 271, 272, 273, 274, 275, 276, 277, 278, 279, 280, 281, 282, 283, 284, 285, 286, 287, 288, 289, 290, 291, 292, 293, 294, 295, 296, 297, 298, 299, 300, 301, 302, 303, 304, 305, 306, 307, 308, 309, 310, 311, 312, 313, 314, 315, 316, 317, 318, 319, 320, 321, 322, 323, 324, 325, 326, 327, 328, 329, 330, 331, 332, 333, 334, 335, 336, 337, 338, 339, 340, 341, 342, 343, 344, 345, 346, 347, 348, 349, 350, 351, 352, 353, 354, 355, 356, 357, 358, 359, 360, 361, 362, 363, 364, 365, 366, 367, 368, 369, 370, 371, 372, 373, 374, 375, 376, 377, 378, 379, 380, 381, 382, 383, 384, 385, 386, 387, 388, 389, 390, 391, 392, 393, 394, 395, 396, 397, 398, 399, 400, 401, 402, 403, 404, 405, 406, 407, 408, 409, 410, 411, 412, 413, 414, 415, 416, 417, 418, 419, 420, 421, 422, 423, 424, 425, 426, 427, 428, 429, 430, 431, 432, 433, 434, 435, 436, 437, 438, 439, 440, 441, 442, 443, 444, 445, 446, 447, 448, 449, 450, 451, 452, 453, 454, 455, 456, 457, and/or 458 can be tested to act as a pesticide upon a pest in a number of ways. One such method is to perform a feeding assay. In such a feeding assay, one exposes the pest to a sample containing either compounds to be tested or control samples. Often this is performed by placing the material to be tested, or a suitable dilution of such material, onto a material that the pest will ingest, such as an artificial diet. The material to be tested may be composed of a liquid, solid, or slurry. The material to be tested may be placed upon the surface and then allowed to dry. Alternatively, the material to be tested may be mixed with a molten artificial diet, and then dispensed into the assay chamber. The assay chamber may be, for example, a cup, a dish, or a well of a microtiter plate.

[0191] Assays for sucking pests (for example aphids) may involve separating the test material from the insect by a partition, ideally a portion that can be pierced by the sucking mouth parts of the sucking insect, to allow ingestion of the test material. Often the test material is mixed with a feeding stimulant, such as sucrose, to promote ingestion of the test compound.

[0192] Other types of assays can include microinjection of the test material into the mouth, or gut of the pest, as well as development of transgenic plants, followed by test of the ability of the pest to feed upon the transgenic plant. Plant testing may involve isolation of the plant parts normally consumed, for example, small cages attached to a leaf, or isolation of entire plants in cages containing insects.

[0193] Other methods and approaches to assay pests are known in the art, and can be found, for example in Robertson and Preisler, eds. (1992) Pesticide bioassays with arthropods, CRC, Boca Raton, Fla. Alternatively, assays are commonly described in the journals Arthropod Management Tests and Journal of Economic Entomology or by discussion with members of the Entomological Society of America (ESA). Any one of SEQ ID NOS: 1, 2, 3, 4, 5, 6, 7, 8, 9, 10, 11, 12, 13, 14, 15, 16, 17, 18, 19, 20, 21, 22, 23, 24, 25, 26, 27, 28, 29, 30, 31, 32, 33, 34, 35, 36, 37, 38, 39, 40, 41, 42, 43, 44, 45, 46, 47, 48, 49, 50, 51, 52, 53, 54, 55, 56, 57, 58, 59, 60, 61, 62, 63, 64, 65, 66, 67, 68, 69, 70, 71, 72, 73, 74, 75, 76, 77, 78, 79, 80, 81, 82, 83, 84, 85, 86, 87, 88, 89, 90, 91, 92, 93, 94, 95, 96, 97, 98, 99, 100, 101, 102, 103, 104, 105, 106, 107, 108, 109, 110, 111, 112, 113, 114, 115, 116, 117, 118, 119, 120, 121, 122, 123, 124, 125, 126, 127, 128, 129, 130, 131, 132, 133, 134, 135, 136, 137, 138, 139, 140, 141, 142, 143, 144, 145, 146, 147, 148, 149, 150, 151, 152, 153, 154, 155, 156, 157, 158, 159, 160, 161, 162, 163, 164, 165, 166, 167, 168, 169, 170, 171, 172, 173, 174, 175, 176, 177, 178, 179, 180, 181, 182, 183, 184, 185, 186, 187, 188, 189, 190, 191, 192, 193, 194, 195, 196, 197, 198, 199, 200, 201, 202, 203, 204, 205, 206, 207, 208, 209, 210, 211, 212, 213, 214, 215, 216, 217, 218, 219, 220, 221, 222, 223, 224, 225, 226, 227, 228, 229, 230, 231, 232, 233, 234, 235, 236, 237, 238, 239, 240, 241, 242, 243, 244, 245, 246, 247, 248, 249, 250, 251, 252, 253, 254, 255, 256, 257, 258, 259, 260, 261, 262, 263, 264, 265, 266, 267, 268, 269, 270, 271, 272, 273, 274, 275, 276, 277, 278, 279, 280, 281, 282, 283, 284, 285, 286, 287, 288, 289, 290, 291, 292, 293, 294, 295, 296, 297, 298, 299, 300, 301, 302, 303, 304, 305, 306, 307, 308, 309, 310, 311, 312, 313, 314, 315, 316, 317, 318, 319, 320, 321, 322, 323, 324, 325, 326, 327, 328, 329, 330, 331, 332, 333, 334, 335, 336, 337, 338, 339, 340, 341, 342, 343, 344, 345, 346, 347, 348, 349, 350, 351, 352, 353, 354, 355, 356, 357, 358, 359, 360, 361, 362, 363, 364, 365, 366, 367, 368, 369, 370, 371, 372, 373, 374, 375, 376, 377, 378, 379, 380, 381, 382, 383, 384, 385, 386, 387, 388, 389, 390, 391, 392, 393, 394, 395, 396, 397, 398, 399, 400, 401, 402, 403, 404, 405, 406, 407, 408, 409, 410, 411, 412, 413, 414, 415, 416, 417, 418, 419, 420, 421, 422, 423, 424, 425, 426, 427, 428, 429, 430, 431, 432, 433, 434, 435, 436, 437, 438, 439, 440, 441, 442, 443, 444, 445, 446, 447, 448, 449, 450, 451, 452, 453, 454, 455, 456, 457, and/or 458 can be expressed and employed in an assay as set forth in Examples 3 and 4, herein.

### Example 9. Pesticidal Activity Against Coleopteran and Lepidoptera

[0194] Protein Expression: Each sequence set forth in Table 3 was expressed in E. coli as described in Example 2. 400 mL of LB was inoculated and grown to an OD600 of 0.6. The culture was induced with 0.25 mM IPTG overnight at 16° C. The cells were spun down and the cell pellet was resuspended in 5 mL of buffer. The resuspension was sonicated for 2 min on ice.

[0195] Bioassay: Fall army worm (FAW), corn ear worm (CEW), European corn borer (ECB) southwestern corn borer (SWCB) and diamond backed moth (DBM or Px) eggs were purchased from a commercial insectary (Benzon Research Inc., Carlisle, Pa.). The FAW, CEW, ECB and BCW eggs were incubated to the point that eclosion would occur within 12 hrs of the assay setup. SWCB and DBM were introduced to the assay as neonate larvae. Assays were carried out in 24-well trays containing multispecies lepidopteran diet (Southland Products Inc., Lake Village, Ark.). Samples of the sonicated lysate were applied to the surface of the diet (diet overlay) and allowed to evaporate and soak into the diet. For CEW, FAW, BCW, ECB and SWCB, a 125 μl of sonicated lysate was added to the diet surface and dried. For DBM, 50 μl of a 1:2 dilution of sonicated lysate was added to the diet surface. The bioassay plates were sealed with a plate sealing film vented with pin holes. The plates were incubated at 26° C. at 65% relative humidity (RH) on a 16:8 day:night cycle in a Percival for 5 days. The assays were assessed for level of mortality, growth inhibition and feeding inhibition.

[0196] For the western corn rootworm (WCR) bioassay, the protein construct/lysate was evaluated in an insect bioassay by dispensing 60 μl volume on the top surface of diet in well/s of 24-well plate (Cellstar, 24-well, Greiner Bio One) and allowed to dry. Each well contained 500 μl diet (Marrone et al., 1985). Fifteen to twenty neonate larvae were introduced in each well using a fine tip paint brush and the plate was covered with membrane (Viewseal, Greiner Bio One). The bioassay was stored at ambient temperature and scored for mortality, and/or growth/feeding inhibition at day 4.

[0197] For Colorado Potato Beetle (CPB) a cork bore size No. 8 leaf disk was excised from potato leaf and was dipped in the protein construct/lysate until thoroughly wet and placed on top of filter disk (Millipore, glass fiber filter, 13 mm). 60 μl dH2O was added to each filter disk and placed in each well of 24-well plate (Cellstar, 24-well, Greiner Bio One). The leaf disk was allowed to dry and five to seven first instar larvae were introduced in each well using a fine tip paint brush. The plate was covered with a membrane (Viewseal, Greiner Bio One) and a small hole was punctured in each well of the membrane. The construct was evaluated with four replicates, and scored for mortality and leaf damage on day 3.

[0198] Table 3 provides a summary of pesticidal activity against coleopteran and lepidoptera of the various sequences. Table code: “−” indicates no activity seen; “+” indicates pesticidal activity; “NT” indicates not tested; “S” indicates stunt; “SS” indicates slight stunt; “HM” indicates high mortality; “LF” indicates low feeding; “M” indicates mortality.

TABLE 3
Summary of Pesticidal Activity against Coleopteran and Lepidoptera.

| | | | | | | | | WCR |
|---|---|---|---|---|---|---|---|---|
| | | | | | | | | Mortality |
| APG | Seq ID NO: | FAW | CEW | BCW | ECB | SWCB | CPB | (%) |
| APG01506.0 | Seq ID 22 | − | NT | NT | NT | NT | NT | − |
| APG07655.0 | Seq ID 246 | − | NT | NT | NT | NT | NT | − |
| APG06690.0 | Seq ID 209 | − | NT | NT | NT | NT | NT | − |
| APG01309.0 | Seq ID 9 | − | NT | NT | NT | NT | NT | − |
| APG08631.1 | Seq ID 302 | M, S | NT | NT | NT | NT | NT | − |
| APG08589.0 | Seq ID 300 | M, S | NT | NT | NT | NT | NT | − |
| APG03379.0 | Seq ID 84 | − | NT | NT | NT | NT | NT | − |
| APG00954.0 | Seq ID 2 | − | NT | NT | NT | NT | NT | − |
| APG04076.0 | Seq ID 114 | SS | − | − | NT | NT | − | − |
| APG04076.1 | Seq ID 115 | SS | − | SS | NT | NT | − | − |
| APG06431.1 | Seq ID 203 | − | NT | NT | NT | NT | NT | − |
| APG07860.1 | Seq ID 267 | − | SS | − | NT | NT | − | − |
| APG03080.0 | Seq ID 76 | − | NT | NT | NT | NT | NT | − |
| APG02912.1 | Seq ID 69 | HM, S | NT | NT | NT | NT | NT | − |
| APG04460.1 | Seq ID 130 | M, S | NT | NT | NT | NT | NT | − |
| APG01900.0 | Seq ID 131 | M, S | NT | NT | NT | NT | NT | − |
| APG08919.1 | Seq ID 316 | − | NT | NT | NT | NT | NT | − |
| APG01718.1 | Seq ID 32 | − | NT | NT | NT | NT | NT | − |
| APG07857.0 | Seq ID 265 | SS | NT | NT | NT | NT | NT | − |
| APG02215.1 | Seq ID 49 | M, S | NT | NT | NT | NT | NT | − |
| APG02445.1 | Seq ID 58 | M, S | NT | NT | NT | NT | NT | − |
| APG03604.0 | Seq ID 89 | SS | SS | SS | NT | NT | + | 96 |
| APG03249.1 | Seq ID 80 | M, S | NT | NT | NT | NT | NT | − |
| APG03299.0 | Seq ID 81 | − | − | − | NT | NT | − | − |
| APG09484.1 | Seq ID 328 | − | NT | NT | NT | NT | NT | − |
| APG06176.1 | Seq ID 192 | − | NT | NT | NT | NT | NT | − |
| APG02782.1 | Seq ID 64 | − | NT | NT | NT | NT | NT | − |
| APG02782.2 | Seq ID 63 | − | NT | NT | NT | NT | NT | − |
| APG04013.1 | Seq ID 113 | − | NT | NT | NT | NT | NT | − |
| APG04597.1 | Seq ID 135 | HM, S | NT | NT | NT | NT | NT | − |
| APG03726.1 | Seq ID 96 | M, S | NT | NT | NT | NT | NT | − |
| APG03015.1 | Seq ID 71 | − | NT | NT | NT | NT | NT | − |
| APG02638.0 | Seq ID 61 | − | NT | NT | NT | NT | NT | − |
| APG04720.1 | Seq ID 142 | S | S | S | NT | NT | − | − |
| APG08088.1 | Seq ID 279 | SS | NT | NT | NT | NT | − | − |
| APG09682.0 | Seq ID 339 | − | NT | NT | NT | NT | NT | − |
| APG05328.0 | Seq ID 161 | − | NT | NT | NT | NT | NT | − |
| APG07961.0 | Seq ID 272 | − | NT | NT | NT | NT | NT | − |
| APG04725.1 | Seq ID 144 | HM, S | NT | NT | NT | NT | NT | − |
| APG05045.1 | Seq ID 158 | − | SS | SS | NT | NT | − | − |
| APG09589.0 | Seq ID 336 | − | NT | NT | NT | NT | NT | − |
| APG02798.1 | Seq ID 66 | SS | NT | NT | NT | NT | NT | − |
| APG01937.0 | Seq ID 45 | − | NT | NT | NT | NT | NT | − |
| APG04477.1 | Seq ID 133 | − | NT | NT | NT | NT | NT | − |
| APG08139.0 | Seq ID 281 | − | NT | NT | NT | NT | NT | − |
| APG06428.0 | Seq ID 200 | − | NT | NT | NT | NT | NT | − |
| APG02204.0 | Seq ID 201 | M, S | NT | NT | NT | NT | NT | − |
| APG03786.1 | Seq ID 103 | − | NT | NT | NT | NT | NT | − |
| APG09877.0 | Seq ID 342 | M, S | NT | NT | NT | NT | NT | − |
| APG07803.1 | Seq ID 262 | SS | NT | NT | NT | NT | NT | − |
| APG04682.1 | Seq ID 140 | SS | NT | NT | NT | NT | NT | − |
| APG04332.1 | Seq ID 119 | M, S | NT | NT | NT | NT | NT | − |
| APG05930.1 | Seq ID 185 | − | NT | NT | NT | NT | NT | − |
| APG07037.1 | Seq ID 235 | − | NT | NT | NT | NT | NT | − |
| APG05025.1 | Seq ID 153 | SS | NT | NT | NT | NT | NT | − |
| APG08108.0 | Seq ID 280 | HM, S | NT | NT | NT | NT | NT | − |
| APG06938.0 | Seq ID 223 | − | NT | NT | NT | NT | NT | − |
| APG00929.0 | Seq ID 1 | − | NT | NT | NT | NT | NT | − |
| APG04176.1 | Seq ID 117 | − | NT | NT | NT | NT | NT | − |
| APG05715.1 | Seq ID 178 | − | NT | NT | NT | NT | NT | − |
| APG08817.1 | Seq ID 311 | − | NT | NT | NT | NT | NT | − |
| APG08817.2 | Seq ID 312 | HM, S | NT | NT | NT | NT | NT | − |
| APG02168.0 | Seq ID 47 | − | NT | NT | NT | NT | NT | − |
| APG09232.1 | Seq ID 321 | − | NT | NT | NT | NT | NT | − |
| APG03732.1 | Seq ID 98 | − | NT | NT | NT | NT | NT | − |
| APG03227.1 | Seq ID 78 | − | NT | NT | NT | NT | NT | − |
| APG02477.1 | Seq ID 60 | M, S | NT | NT | NT | NT | NT | − |
| APG07748.2 | Seq ID 253 | − | NT | NT | NT | NT | NT | − |
| APG09630.1 | Seq ID 338 | − | NT | NT | NT | NT | NT | − |
| APG08396.2 | Seq ID 296 | − | NT | NT | NT | NT | NT | − |
| APG07518.1 | Seq ID 242 | SS | NT | NT | NT | NT | NT | − |
| APG01849.2 | Seq ID 41 | S | NT | NT | NT | NT | NT | − |
| APG08350.1 | Seq ID 293 | SS | NT | NT | NT | NT | NT | − |
| APG05658.1 | Seq ID 176 | M, S | NT | NT | NT | NT | NT | − |
| APG09084.0 | Seq ID 319 | M, S | NT | NT | NT | NT | NT | − |
| APG03053.1 | Seq ID 73 | M, S | NT | NT | NT | NT | NT | − |
| APG07396.0 | Seq ID 240 | HM, S | NT | NT | NT | NT | NT | − |
| APG04431.1 | Seq ID 128 | − | NT | NT | NT | NT | NT | − |
| APG05804.0 | Seq ID 179 | HM, S | NT | NT | NT | NT | NT | − |
| APG08230.1 | Seq ID 286 | M, S | − | − | NT | NT | + | − |
| APG06051.0 | Seq ID 188 | − | NT | NT | NT | NT | NT | − |
| APG07818.1 | Seq ID 264 | HM, S | NT | NT | NT | NT | NT | − |
| APG06921.0 | Seq ID 222 | − | NT | NT | NT | NT | NT | − |
| APG01459.1 | Seq ID 19 | − | NT | NT | NT | NT | NT | − |
| APG08657.1 | Seq ID 304 | M, S | NT | NT | NT | NT | NT | − |
| APG07731.1 | Seq ID 251 | M, S | NT | NT | NT | NT | NT | − |
| APG03848.1 | Seq ID 105 | − | NT | NT | NT | NT | NT | − |
| APG05370.1 | Seq ID 163 | − | NT | NT | NT | NT | NT | − |
| APG01780.1 | Seq ID 37 | − | NT | NT | NT | NT | NT | − |
| APG01915.1 | Seq ID 44 | M, S | NT | NT | NT | NT | NT | − |
| APG06253.1 | Seq ID 194 | HM, S | NT | NT | NT | NT | NT | − |
| APG04350.1 | Seq ID 121 | − | NT | NT | NT | NT | NT | − |
| APG05810.1 | Seq ID 181 | − | NT | NT | NT | NT | NT | − |
| APG06995.0 | Seq ID 228 | M, S | NT | NT | NT | NT | NT | − |
| APG01742.1 | Seq ID 34 | − | NT | NT | NT | NT | NT | − |
| APG01644.1 | Seq ID 28 | − | NT | NT | NT | NT | NT | − |
| APG05506.0 | Seq ID 167 | HM, S | NT | NT | NT | NT | NT | − |
| APG07783.1 | Seq ID 256 | SS | NT | NT | NT | NT | NT | − |
| APG05615.1 | Seq ID 169 | − | NT | NT | NT | NT | NT | − |
| APG01790.1 | Seq ID 39 | − | NT | NT | NT | NT | NT | − |
| APG07559.1 | Seq ID 245 | − | − | SS | NT | NT | − | − |
| APG07559.2 | Seq ID 244 | − | − | SS | NT | NT | − | − |
| APG02293.1 | Seq ID 53 | − | NT | NT | NT | NT | NT | − |
| APG05651.1 | Seq ID 172 | − | NT | NT | NT | NT | NT | − |
| APG01772.0 | Seq ID 35 | SS | NT | NT | NT | NT | NT | − |
| APG01399.1 | Seq ID 17 | − | NT | NT | NT | NT | NT | − |
| APG07036.1 | Seq ID 233 | M, S | NT | NT | NT | NT | NT | + |
| APG03072.1 | Seq ID 75 | − | NT | NT | NT | NT | NT | − |
| APG06372.2 | Seq ID 198 | SS | NT | NT | NT | NT | NT | − |
| APG05978.1 | Seq ID 187 | − | NT | NT | NT | NT | NT | − |
| APG01239.0 | Seq ID 227 | − | NT | NT | NT | NT | NT | − |
| APG06942.1 | Seq ID 226 | − | NT | NT | NT | NT | NT | − |
| APG06942.2 | Seq ID 225 | − | NT | NT | NT | NT | NT | − |
| APG07100.0 | Seq ID 238 | − | NT | NT | NT | NT | NT | − |
| APG07100.1 | Seq ID 239 | − | NT | NT | NT | NT | NT | − |
| APG07870.1 | Seq ID 271 | − | NT | NT | NT | NT | NT | − |
| APG07870.2 | Seq ID 270 | − | NT | NT | NT | NT | NT | − |
| APG03519.1 | Seq ID 86 | − | NT | NT | NT | NT | NT | − |
| APG03519.2 | Seq ID 87 | − | NT | NT | NT | NT | NT | − |
| APG09936.1 | Seq ID 344 | − | NT | NT | NT | NT | NT | − |
| APG06650.0 | Seq ID 207 | − | NT | NT | NT | NT | NT | − |
| APG06650.1 | Seq ID 208 | M, S | NT | NT | NT | NT | NT | − |
| APG01387.1 | Seq ID 14 | − | NT | NT | NT | NT | NT | − |
| APG01387.2 | Seq ID 15 | − | NT | NT | NT | NT | NT | − |
| APG01238.0 | Seq ID 213 | − | NT | NT | NT | NT | NT | − |
| APG06739.1 | Seq ID 212 | − | NT | NT | NT | NT | NT | − |
| APG06739.2 | Seq ID 211 | − | NT | NT | NT | NT | NT | − |
| APG09573.1 | Seq ID 335 | − | NT | NT | NT | NT | NT | − |
| APG09573.2 | Seq ID 334 | − | NT | NT | NT | NT | NT | − |
| APG08174.2 | Seq ID 283 | − | NT | NT | NT | NT | NT | − |
| APG02809.0 | Seq ID 67 | M, | NT | NT | NT | NT | NT | − |
| | | SS | | | | | | |
| APG03746.2 | Seq ID 100 | − | NT | NT | NT | NT | NT | − |
| APG08039.1 | Seq ID 275 | − | NT | NT | NT | NT | NT | − |
| APG02291.0 | Seq ID 51 | − | NT | NT | NT | NT | NT | − |
| APG01522.1 | Seq ID 26 | − | NT | NT | NT | NT | NT | − |
| APG09413.0 | Seq ID 326 | − | NT | NT | NT | NT | NT | − |
| APG04978.0 | Seq ID 151 | M, | NT | NT | NT | NT | NT | − |
| | | SS | | | | | | |
| APG04418.2 | Seq ID 125 | − | NT | NT | NT | NT | NT | − |
| APG03569.0 | Seq ID 88 | − | NT | NT | NT | NT | NT | − |
| APG06630.2 | Seq ID 205 | − | NT | NT | NT | NT | NT | − |
| APG08931.1 | Seq ID 318 | − | NT | NT | NT | NT | NT | − |
| APG03901.2 | Seq ID 107 | SS | NT | NT | NT | NT | NT | − |
| APG08851.0 | Seq ID 323 | SS | NT | NT | NT | NT | NT | − |
| APG09234.0 | Seq ID 322 | SS | NT | NT | NT | NT | NT | − |
| APG01474.1 | Seq ID 21 | − | NT | NT | NT | NT | NT | − |
| APG08525.1 | Seq ID 299 | M, | NT | NT | NT | NT | NT | − |
| | | SS | | | | | | |
| APG04598.0 | Seq ID 136 | M, S | NT | NT | NT | NT | NT | − |
| APG08693.1 | Seq ID 309 | − | NT | NT | NT | NT | NT | − |
| APG02408.2 | Seq ID 55 | SS | NT | NT | NT | NT | NT | − |
| APG06161.1 | Seq ID 190 | SS | NT | NT | NT | NT | NT | − |
| APG01044.1 | Seq ID 4 | − | NT | NT | NT | NT | NT | − |
| APG07866.0 | Seq ID 268 | − | NT | NT | NT | NT | NT | − |
| APG03309.1 | Seq ID 83 | SS | NT | NT | NT | NT | NT | − |
| APG08461.0 | Seq ID 297 | SS | − | − | NT | NT | − | − |
| APG01996.0 | Seq ID 46 | − | NT | NT | NT | NT | NT | − |
| APG07983.0 | Seq ID 273 | − | NT | NT | NT | NT | NT | − |
| APG08278.2 | Seq ID 289 | SS | NT | NT | NT | NT | NT | − |
| APG07787.0 | Seq ID 257 | SS | NT | NT | NT | NT | NT | − |
| APG06768.0 | Seq ID 214 | SS | NT | NT | NT | NT | NT | − |
| APG08898.1 | Seq ID 314 | − | NT | NT | NT | NT | NT | − |
| APG06880.1 | Seq ID 218 | SS | NT | NT | NT | NT | NT | − |
| APG01087.1 | Seq ID 6 | − | NT | NT | NT | NT | NT | − |
| APG06912.2 | Seq ID 221 | SS | NT | NT | NT | NT | NT | − |
| APG05384.2 | Seq ID 166 | SS | NT | NT | NT | NT | NT | − |
| APG05653.1 | Seq ID 174 | SS | NT | NT | NT | NT | NT | − |
| APG04640.1 | Seq ID 138 | M, | NT | NT | NT | NT | NT | − |
| | | SS | | | | | | |
| APG04804.1 | Seq ID 146 | SS | NT | NT | NT | NT | NT | − |
| APG09296.1 | Seq ID 325 | − | NT | NT | NT | NT | NT | − |
| APG06364.1 | Seq ID 196 | − | NT | NT | NT | NT | NT | − |
| APG05034.2 | Seq ID 155 | SS | NT | NT | NT | NT | NT | − |
| APG01517.1 | Seq ID 24 | SS | NT | NT | NT | NT | NT | − |
| APG06784.1 | Seq ID 216 | SS | NT | NT | NT | NT | NT | − |
| APG05619.0 | Seq ID 170 | SS | NT | NT | NT | NT | NT | − |
| APG08665.2 | Seq ID 306 | − | NT | NT | NT | NT | NT | − |
| APG09543.1 | Seq ID 330 | SS | NT | NT | NT | NT | NT | − |
| APG09947.1 | Seq ID 346 | SS | NT | NT | NT | NT | NT | − |
| APG03699.1 | Seq ID 91 | − | NT | NT | NT | NT | NT | − |
| APG09864.1 | Seq ID 341 | − | NT | NT | NT | NT | NT | − |
| APG07058.1 | Seq ID 237 | − | NT | NT | NT | NT | NT | − |
| APG04807.1 | Seq ID 148 | − | NT | NT | NT | NT | NT | − |
| APG08307.1 | Seq ID 291 | − | NT | NT | NT | NT | NT | − |
| APG03995.1 | Seq ID 354 | − | NT | NT | NT | NT | NT | − |
| APG03000.0 | Seq ID 352 | SS | NT | NT | NT | NT | NT | − |
| APG08065.1 | Seq ID 277 | − | NT | NT | NT | NT | NT | − |
| APG01231.1 | Seq ID 8 | − | NT | NT | NT | NT | NT | − |
| APG03722.2 | Seq ID 94 | − | NT | NT | NT | NT | NT | − |
| APG07016.2 | Seq ID 231 | − | NT | NT | NT | NT | NT | − |
| APG01329.2 | Seq ID 11 | HM, S | NT | NT | NT | NT | NT | − |
| APG01676.1 | Seq ID 30 | − | NT | NT | NT | NT | NT | − |
| APG09545.1 | Seq ID 332 | SS | NT | NT | NT | NT | NT | − |
| APG05924.1 | Seq ID 183 | SS | NT | NT | NT | NT | NT | − |
| APG09984.0 | Seq ID 347 | M, | NT | NT | NT | NT | NT | − |
| | | SS | | | | | | |
| APG04931.1 | Seq ID 150 | S | NT | NT | NT | NT | NT | − |
| APG04365.1 | Seq ID 123 | − | NT | NT | NT | NT | NT | − |
| APG07790.2 | Seq ID 259 | SS | NT | NT | NT | NT | NT | − |
| APG07672.2 | Seq ID 249 | SS | NT | NT | NT | NT | NT | − |
| APG05084.1 | Seq ID 160 | SS | NT | NT | NT | NT | NT | − |
| APG03947.2 | Seq ID 110 | M, | NT | NT | NT | NT | NT | − |
| | | SS | | | | | | |
| APG06291.1 | Seq ID 360 | − | NT | NT | NT | NT | NT | − |
| APG05497.1 | Seq ID 358 | M, | NT | NT | NT | NT | NT | − |
| | | SS | | | | | | |
| APG09231.0 | Seq ID 367 | − | NT | NT | NT | NT | NT | − |
| APG02585.1 | Seq ID 351 | − | NT | NT | NT | NT | NT | − |
| APG04196.1 | Seq ID 356 | − | NT | NT | NT | NT | NT | − |
| APG00905.1 | Seq ID 349 | SS | NT | NT | NT | NT | NT | − |
| APG06371.1 | Seq ID 362 | − | NT | NT | NT | NT | NT | − |
| APG07648.1 | Seq ID 366 | SS | NT | NT | NT | NT | NT | − |
| APG07577.1 | Seq ID 364 | SS | NT | NT | NT | NT | NT | − |
| APG07724.1 | Seq ID 422 | − | NT | NT | NT | NT | NT | − |
| APG01809.1 | Seq ID 376 | − | NT | NT | NT | NT | NT | − |
| APG04458.1 | Seq ID 403 | M, | NT | NT | NT | NT | NT | − |
| | | SS | | | | | | |
| APG09824.1 | Seq ID 430 | − | NT | NT | NT | NT | NT | − |
| APG04251.1 | Seq ID 401 | − | NT | NT | NT | NT | NT | − |
| APG05226.1 | Seq ID 410 | SS | NT | NT | NT | NT | NT | − |
| APG06330.2 | Seq ID 415 | SS | NT | NT | NT | NT | NT | − |
| APG07936.1 | Seq ID 424 | − | NT | NT | NT | NT | NT | − |
| APG08381.1 | Seq ID 426 | SS | NT | NT | NT | NT | NT | − |
| APG00923.2 | Seq ID 370 | − | NT | NT | NT | NT | NT | − |
| APG02362.2 | Seq ID 382 | M, | NT | NT | NT | NT | NT | − |
| | | SS | | | | | | |
| APG03337.1 | Seq ID 393 | − | NT | NT | NT | NT | NT | − |
| APG00941.1 | Seq ID 372 | − | NT | NT | NT | NT | NT | − |
| APG03438.1 | Seq ID 398 | − | NT | NT | NT | NT | NT | − |
| APG07160.2 | Seq ID 420 | − | NT | NT | NT | NT | NT | − |
| APG03297.2 | Seq ID 391 | − | NT | NT | NT | NT | NT | − |
| APG04650.2 | Seq ID 406 | − | NT | NT | NT | NT | NT | − |
| APG05337.1 | Seq ID 412 | − | NT | NT | NT | NT | NT | − |
| APG02686.2 | Seq ID 388 | − | NT | NT | NT | NT | NT | − |
| APG02421.2 | Seq ID 385 | − | NT | NT | NT | NT | NT | − |
| APG02194.2 | Seq ID 379 | − | NT | NT | NT | NT | NT | − |
| APG09755.1 | Seq ID 428 | − | NT | NT | NT | NT | NT | − |
| APG06841.1 | Seq ID 417 | − | NT | NT | NT | NT | NT | − |
| APG03352.1 | Seq ID 395 | − | NT | NT | NT | NT | NT | − |
| APG03422.0 | Seq ID 396 | − | NT | NT | NT | NT | NT | − |
| APG04806.1 | Seq ID 408 | − | NT | NT | NT | NT | NT | − |
| APG01202.0 | Seq ID 373 | NT | NT | NT | NT | NT | NT | NT |
| APG03891.0 | Seq ID 399 | − | NT | NT | NT | NT | NT | − |
| APG03861.2 | Seq ID 442 | SS | NT | NT | NT | NT | NT | − |
| APG07911.1 | Seq ID 455 | − | NT | NT | NT | NT | NT | − |
| APG06587.1 | Seq ID 453 | SS | NT | NT | NT | NT | NT | − |
| APG04374.3 | Seq ID 446 | SS | NT | NT | NT | NT | NT | − |
| APG01515.1 | Seq ID 432 | − | NT | NT | NT | NT | NT | − |
| APG05852.1 | Seq ID 450 | − | NT | NT | NT | NT | NT | − |
| APG08051.2 | Seq ID 458 | − | NT | NT | NT | NT | NT | − |

### Example 10. Pesticidal Activity Against Hemipteran

[0199] Protein Expression: Each of the sequences set forth in Table 4 was expressed in E. coli as described in Example 2. 400 mL of LB was inoculated and grown to an OD600 of 0.6. The culture was induced with 0.25 mM IPTG overnight at 16° C. The cells were spun down and the cell pellet was re-suspended in 5 mL of buffer. The resuspension was sonicated for 2 min on ice.

[0200] Second instar southern green stinkbug (SGSB) were obtained from a commercial insectary (Benzon Research Inc., Carlisle, Pa.). A 50% v/v ratio of sonicated lysate sample to 20% sucrose was employed in the bioassay. Stretched parafilm was used as a feeding membrane to expose the SGSB to the diet/sample mixture. The plates were incubated at 25° C.: 21° C., 16:8 day:night cycle at 65% RH for 5 days.

[0201] Mortality was scored for each sample. The results are set forth in Table 4. A dashed line indicates no mortality was detected. The proteins listed in Table 4 showed from about 10% to about 100% mortality 25% mortality or 50% mortality (as indicated) against southern green stinkbug (1 stinkbug out of 4 died). The negative controls (empty vector expressed binding domain and buffer only) both showed no mortality (0 stinkbugs out of 4).

TABLE 4
Summary of Pesticidal Activity against Hemipteran

| APG | Seq ID | Tested against SGSB (%) |
|---|---|---|
| APG01506.0 | Seq ID 22 | 40 |
| APG07655.0 | Seq ID 246 | 20 |
| APG06690.0 | Seq ID 209 | 30 |
| APG01309.0 | Seq ID 9 | 30 |
| APG08631.1 | Seq ID 302 | 30 |
| APG08589.0 | Seq ID 300 | 10 |
| APG03379.0 | Seq ID 84 | 0 |
| APG00954.0 | Seq ID 2 | 20 |
| APG04076.0 | Seq ID 114 | 0 |
| APG04076.1 | Seq ID 115 | 0 |
| APG06431.1 | Seq ID 203 | 30 |
| APG07860.1 | Seq ID 267 | 20 |
| APG03080.0 | Seq ID 76 | 20 |
| APG02912.1 | Seq ID 69 | 40 |
| APG04460.1 | Seq ID 130 | 40 |
| APG01900.0 | Seq ID 131 | 10 |
| APG08919.1 | Seq ID 316 | 0 |
| APG01718.1 | Seq ID 32 | 30 |
| APG07857.0 | Seq ID 265 | 40 |
| APG02215.1 | Seq ID 49 | 20 |
| APG02445.1 | Seq ID 58 | 30 |
| APG03604.0 | Seq ID 89 | 100 |
| APG03249.1 | Seq ID 80 | 0 |
| APG03299.0 | Seq ID 81 | 25 |
| APG09484.1 | Seq ID 328 | 20 |
| APG06176.1 | Seq ID 192 | 20 |
| APG02782.1 | Seq ID 64 | 30 |
| APG02782.2 | Seq ID 63 | 30 |
| APG04013.1 | Seq ID 113 | 20 |
| APG04597.1 | Seq ID 135 | 30 |
| APG03726.1 | Seq ID 96 | 60 |
| APG03015.1 | Seq ID 71 | 40 |
| APG02638.0 | Seq ID 61 | 30 |
| APG04720.1 | Seq ID 142 | 20 |
| APG08088.1 | Seq ID 279 | 30 |
| APG09682.0 | Seq ID 339 | 30 |
| APG05328.0 | Seq ID 161 | 30 |
| APG07961.0 | Seq ID 272 | 20 |
| APG04725.1 | Seq ID 144 | 30 |
| APG05045.1 | Seq ID 158 | 40 |
| APG09589.0 | Seq ID 336 | 0 |
| APG02798.1 | Seq ID 66 | 30 |
| APG01937.0 | Seq ID 45 | 0 |
| APG04477.1 | Seq ID 133 | 40 |
| APG08139.0 | Seq ID 281 | 90 |
| APG06428.0 | Seq ID 200 | 0 |
| APG02204.0 | Seq ID 201 | 40 |
| APG03786.1 | Seq ID 103 | 10 |
| APG09877.0 | Seq ID 342 | 10 |
| APG07803.1 | Seq ID 262 | 0 |
| APG04682.1 | Seq ID 140 | 10 |
| APG04332.1 | Seq ID 119 | 20 |
| APG05930.1 | Seq ID 185 | 30 |
| APG07037.1 | Seq ID 235 | 20 |
| APG05025.1 | Seq ID 153 | 0 |
| APG08108.0 | Seq ID 280 | 20 |
| APG06938.0 | Seq ID 223 | 0 |
| APG00929.0 | Seq ID 1 | 40 |
| APG04176.1 | Seq ID 117 | 40 |
| APG05715.1 | Seq ID 178 | 40 |
| APG08817.1 | Seq ID 311 | 30 |
| APG08817.2 | Seq ID 312 | 0 |
| APG02168.0 | Seq ID 47 | 10 |
| APG09232.1 | Seq ID 321 | 20 |
| APG03732.1 | Seq ID 98 | 30 |
| APG03227.1 | Seq ID 78 | 20 |
| APG02477.1 | Seq ID 60 | 20 |
| APG07748.2 | Seq ID 253 | 50 |
| APG09630.1 | Seq ID 338 | 20 |
| APG08396.2 | Seq ID 296 | 50 |
| APG07518.1 | Seq ID 242 | 0 |
| APG01849.2 | Seq ID 41 | 10 |
| APG08350.1 | Seq ID 293 | 0 |
| APG05658.1 | Seq ID 176 | 30 |
| APG09084.0 | Seq ID 319 | 20 |
| APG03053.1 | Seq ID 73 | 30 |
| APG07396.0 | Seq ID 240 | 30 |
| APG04431.1 | Seq ID 128 | 50 |
| APG05804.0 | Seq ID 179 | 10 |
| APG08230.1 | Seq ID 286 | 40 |
| APG06051.0 | Seq ID 188 | 20 |
| APG07818.1 | Seq ID 264 | 10 |
| APG06921.0 | Seq ID 222 | 40 |
| APG01459.1 | Seq ID 19 | 10 |
| APG08657.1 | Seq ID 304 | 10 |
| APG07731.1 | Seq ID 251 | 20 |
| APG03848.1 | Seq ID 105 | 60 |
| APG05370.1 | Seq ID 163 | 30 |
| APG01780.1 | Seq ID 37 | 20 |
| APG01915.1 | Seq ID 44 | 40 |
| APG06253.1 | Seq ID 194 | 60 |
| APG04350.1 | Seq ID 121 | 10 |
| APG05810.1 | Seq ID 181 | 20 |
| APG06995.0 | Seq ID 228 | 10 |
| APG01742.1 | Seq ID 34 | 60 |
| APG01644.1 | Seq ID 28 | 60 |
| APG05506.0 | Seq ID 167 | 40 |
| APG07783.1 | Seq ID 256 | 30 |
| APG05615.1 | Seq ID 169 | 30 |
| APG01790.1 | Seq ID 39 | 0 |
| APG07559.1 | Seq ID 245 | 75 |
| APG07559.2 | Seq ID 244 | 25 |
| APG02293.1 | Seq ID 53 | 40 |
| APG05651.1 | Seq ID 172 | 30 |
| APG01772.0 | Seq ID 35 | 50 |
| APG01399.1 | Seq ID 17 | 10 |
| APG07036.1 | Seq ID 233 | 20 |
| APG03072.1 | Seq ID 75 | 40 |
| APG06372.2 | Seq ID 198 | 30 |
| APG05978.1 | Seq ID 187 | 50 |
| APG01239.0 | Seq ID 227 | 30 |
| APG06942.1 | Seq ID 226 | 0 |
| APG06942.2 | Seq ID 225 | 10 |
| APG07100.0 | Seq ID 238 | 20 |
| APG07100.1 | Seq ID 239 | 40 |
| APG07870.1 | Seq ID 271 | 40 |
| APG07870.2 | Seq ID 270 | 20 |
| APG03519.1 | Seq ID 86 | 30 |
| APG03519.2 | Seq ID 87 | 40 |
| APG09936.1 | Seq ID 344 | 50 |
| APG06650.0 | Seq ID 207 | 50 |
| APG06650.1 | Seq ID 208 | 70 |
| APG01387.1 | Seq ID 14 | 0 |
| APG01387.2 | Seq ID 15 | 10 |
| APG01238.0 | Seq ID 213 | 50 |
| APG06739.1 | Seq ID 212 | 20 |
| APG06739.2 | Seq ID 211 | 40 |
| APG09573.1 | Seq ID 335 | 50 |
| APG09573.2 | Seq ID 334 | 30 |
| APG08174.2 | Seq ID 283 | 50 |
| APG02809.0 | Seq ID 67 | 40 |
| APG03746.2 | Seq ID 100 | 30 |
| APG08039.1 | Seq ID 275 | 30 |
| APG02291.0 | Seq ID 51 | 30 |
| APG01522.1 | Seq ID 26 | 30 |
| APG09413.0 | Seq ID 326 | 20 |
| APG04978.0 | Seq ID 151 | 50 |
| APG04418.2 | Seq ID 125 | 30 |
| APG03569.0 | Seq ID 88 | 30 |
| APG06630.2 | Seq ID 205 | 10 |
| APG08931.1 | Seq ID 318 | 30 |
| APG03901.2 | Seq ID 107 | 20 |
| APG08851.0 | Seq ID 323 | 50 |
| APG09234.0 | Seq ID 322 | 40 |
| APG01474.1 | Seq ID 21 | 70 |
| APG08525.1 | Seq ID 299 | 30 |
| APG04598.0 | Seq ID 136 | 50 |
| APG08693.1 | Seq ID 309 | 30 |
| APG02408.2 | Seq ID 55 | 40 |
| APG06161.1 | Seq ID 190 | 40 |
| APG01044.1 | Seq ID 4 | 20 |
| APG07866.0 | Seq ID 268 | 40 |
| APG03309.1 | Seq ID 83 | 0 |
| APG08461.0 | Seq ID 297 | 40 |
| APG01996.0 | Seq ID 46 | 60 |
| APG07983.0 | Seq ID 273 | 40 |
| APG08278.2 | Seq ID 289 | 20 |
| APG07787.0 | Seq ID 257 | 30 |
| APG06768.0 | Seq ID 214 | 60 |
| APG08898.1 | Seq ID 314 | 40 |
| APG06880.1 | Seq ID 218 | 20 |
| APG01087.1 | Seq ID 6 | 10 |
| APG06912.2 | Seq ID 221 | 40 |
| APG05384.2 | Seq ID 166 | 30 |
| APG05653.1 | Seq ID 174 | 20 |
| APG04640.1 | Seq ID 138 | 0 |
| APG04804.1 | Seq ID 146 | 40 |
| APG09296.1 | Seq ID 325 | 30 |
| APG06364.1 | Seq ID 196 | 40 |
| APG05034.2 | Seq ID 155 | 20 |
| APG01517.1 | Seq ID 24 | 30 |
| APG06784.1 | Seq ID 216 | 50 |
| APG05619.0 | Seq ID 170 | 10 |
| APG08665.2 | Seq ID 306 | 50 |
| APG09543.1 | Seq ID 330 | 60 |
| APG09947.1 | Seq ID 346 | 30 |
| APG03699.1 | Seq ID 91 | 40 |
| APG09864.1 | Seq ID 341 | 50 |
| APG07058.1 | Seq ID 237 | 50 |
| APG04807.1 | Seq ID 148 | 10 |
| APG08307.1 | Seq ID 291 | 30 |
| APG03995.1 | Seq ID 354 | 40 |
| APG03000.0 | Seq ID 352 | 50 |
| APG08065.1 | Seq ID 277 | 30 |
| APG01231.1 | Seq ID 8 | 0 |
| APG03722.2 | Seq ID 94 | 30 |
| APG07016.2 | Seq ID 231 | 10 |
| APG01329.2 | Seq ID 11 | 40 |
| APG01676.1 | Seq ID 30 | 60 |
| APG09545.1 | Seq ID 332 | 10 |
| APG05924.1 | Seq ID 183 | 20 |
| APG09984.0 | Seq ID 347 | 10 |
| APG04931.1 | Seq ID 150 | 50 |
| APG04365.1 | Seq ID 123 | 30 |
| APG07790.2 | Seq ID 259 | 40 |
| APG07672.2 | Seq ID 249 | 40 |
| APG05084.1 | Seq ID 160 | 30 |
| APG03947.2 | Seq ID 110 | 10 |
| APG06291.1 | Seq ID 360 | 20 |
| APG05497.1 | Seq ID 358 | 50 |
| APG09231.0 | Seq ID 367 | 30 |
| APG02585.1 | Seq ID 351 | 20 |
| APG04196.1 | Seq ID 356 | 0 |
| APG00905.1 | Seq ID 349 | 0 |
| APG06371.1 | Seq ID 362 | 30 |
| APG07648.1 | Seq ID 366 | 0 |
| APG07577.1 | Seq ID 364 | 20 |
| APG07724.1 | Seq ID 422 | 10 |
| APG01809.1 | Seq ID 376 | 30 |
| APG04458.1 | Seq ID 403 | 40 |
| APG09824.1 | Seq ID 430 | 40 |
| APG04251.1 | Seq ID 401 | 40 |
| APG05226.1 | Seq ID 410 | 100 |
| APG06330.2 | Seq ID 415 | 60 |
| APG07936.1 | Seq ID 424 | 40 |
| APG08381.1 | Seq ID 426 | 40 |
| APG00923.2 | Seq ID 370 | 70 |
| APG02362.2 | Seq ID 382 | 40 |
| APG03337.1 | Seq ID 393 | 10 |
| APG00941.1 | Seq ID 372 | 30 |
| APG03438.1 | Seq ID 398 | 50 |
| APG07160.2 | Seq ID 420 | 20 |
| APG03297.2 | Seq ID 391 | 60 |
| APG04650.2 | Seq ID 406 | 40 |
| APG05337.1 | Seq ID 412 | 30 |
| APG02686.2 | Seq ID 388 | 40 |
| APG02421.2 | Seq ID 385 | 20 |
| APG02194.2 | Seq ID 379 | 30 |
| APG09755.1 | Seq ID 428 | 40 |
| APG06841.1 | Seq ID 417 | 30 |
| APG03352.1 | Seq ID 395 | 0 |
| APG03422.0 | Seq ID 396 | 0 |
| APG04806.1 | Seq ID 408 | 0 |
| APG01202.0 | Seq ID 373 | 50 |
| APG03891.0 | Seq ID 399 | 50 |
| APG03861.2 | Seq ID 442 | 50 |
| APG07911.1 | Seq ID 455 | 30 |
| APG06587.1 | Seq ID 453 | 0 |
| APG04374.3 | Seq ID 446 | 10 |
| APG01515.1 | Seq ID 432 | NT |
| APG05852.1 | Seq ID 450 | NT |
| APG08051.2 | Seq ID 458 | NT |

### Example 11. Pesticidal Activity Against Soybean Aphid

[0202] Protein Expression: Each sequence set forth in Table 6 (or an active variant or fragment thereof) was expressed in E. coli as described in Example 2. 400 mL of LB was inoculated and grown to an OD600 of 0.6. The culture was induced with 0.25 mM IPTG overnight at 16° C. The cells were spun down and the cell pellet was resuspended in 5 mL of buffer. The resuspension was sonicated for 2 min on ice.

[0203] Soybean aphids (SBA) were obtained from Michigan State University. Six adult aphids were added to each well of a 24 well plate. Purified proteins were provided in liquid artificial diet at a rate of 25% (50 ul protein, 150 ul artificial diet), and were sealed with an artificial membrane through which the aphids are able to feed. The plates were held in an incubator at 26° C., 60% RH, 16:8 day:night cycle for 5 days. Mortality, feeding, and reproduction were scored for each sample on days 3, 4, and 5 post-treatment. Mortality was calculated as percent dead of the original 6 adult aphids. Feed and reproduction activities were assigned a score on a 0-3 point scale with 0 being no feeding or reproduction and 3 being high feeding or reproduction. Feeding was measured as the amount of honeydew (liquid excretions produced by aphids) that collected in each well. Reproduction was the number of live immature aphids that were observed in each well. Mortality, feeding, and reproduction data were assessed using a combined scoring system to establish cutoff levels for activity. The combined score was calculated as:

[0204] Combined Score=(Feeding+Reproduction+Mortality Score)/3, where Mortality Score=3−(3×% Mortality/100). The results are set forth in Table 6. “+” indicates pesticidal activity.

TABLE 5
Cut-offs used to rate individual wells as active or not for each
observational day post-introduction of aphids to assay wells.
A well is deemed active if measure ≤ cut-off.

| | Cut-off used to | | |
|---|---|---|---|
| | designate activity | | |
| Activity Measure | Day 3 | Day 4 | Day 5 |
| Combined Score | 2 | 1.5 | 1 |

TABLE 6
Summary of Pesticidal Activity against soybean aphid

| APG | Seq ID | Tested against SBA |
|---|---|---|
| APG03604.0 | Seq ID 89 | + |
| APG04597.1 | Seq ID 135 | + |
| APG03726.1 | Seq ID 96 | + |
| APG05226.1 | Seq ID 410 | + |

SEQ ID NOs: 1, 2, 4, 6, 8, 9, 11, 14, 15, 17, 19, 21, 22, 24, 26, 28, 30, 32, 34, 35, 37, 39, 41, 44, 45, 46, 47, 49, 51, 53, 55, 58, 60, 61, 63, 64, 66, 67, 69, 71, 73, 75, 76, 80, 81, 83, 84, 86, 87, 88, 91, 94, 98, 100, 103, 105, 107, 110, 113, 117, 119, 121, 123, 125, 128, 130, 131, 133, 136, 138, 140, 142, 144, 146, 148, 150, 151, 153, 155, 158, 160, 161, 163, 166, 167, 169, 170, 172, 174, 176, 178, 179, 181, 183, 185, 187, 188, 190, 192, 194, 196, 198, 200, 201, 203, 205, 207, 208, 209, 211, 212, 213, 214, 216, 218, 221, 222, 223, 225, 226, 227, 228, 231, 233, 235, 237, 238, 239, 240, 242, 244, 245, 246, 249, 251, 253, 256, 257, 259, 262, 264, 265, 267, 268, 270, 271, 272, 273, 275, 277, 279, 280, 281, 283, 286, 289, 291, 293, 296, 297, 299, 300, 302, 304, 306, 309, 311, 312, 314, 316, 318, 319, 321, 322, 323, 325, 326, 328, 330, 332, 334, 335, 336, 338, 339, 341, 342, 344, 346, 347, 349, 351, 352, 354, 356, 358, 360, 362, 364, 366, 367, 370, 372, 373, 376, 379, 382, 385, 388, 391, 393, 395, 396, 398, 399, 401, 403, 406, 408, 412, 415, 417, 420, 422, 424, 426, 428, 430, 442, 446, 453, and 455 were tested and did not have activity in this experiment.

[0205] All publications and patent applications mentioned in the specification are indicative of the level of skill of those skilled in the art to which this invention pertains. All publications and patent applications are herein incorporated by reference to the same extent as if each individual publication or patent application was specifically and individually indicated to be incorporated by reference.

[0206] Although the foregoing invention has been described in some detail by way of illustration and example for purposes of clarity of understanding, it will be obvious that certain changes and modifications may be practiced within the scope of the appended claims.

That which is claimed is:

1. An isolated polypeptide having insecticidal activity, comprising
(a) a polypeptide comprising an amino acid sequence having at least 90% percent sequence identity to an amino acid sequence selected from the group consisting of sequences set forth in SEQ ID NOs: 1, 2, 3, 4, 5, 6, 7, 8, 9, 10, 11, 12, 13, 14, 15, 16, 17, 18, 19, 20, 21, 22, 23, 24, 25, 26, 27, 28, 29, 30, 31, 32, 33, 34, 35, 36, 37, 38, 39, 40, 41, 42, 43, 44, 45, 46, 47, 48, 49, 50, 51, 52, 53, 54, 55, 56, 57, 58, 59, 60, 61, 62, 63, 64, 65, 66, 67, 68, 69, 70, 71, 72, 73, 74, 75, 76, 77, 78, 79, 80, 81, 82, 83, 84, 85, 86, 87, 88, 89, 90, 91, 92, 93, 94, 95, 96, 97, 98, 99, 100, 101, 102, 103, 104, 105, 106, 107, 108, 109, 110, 111, 112, 113, 114, 115, 116, 117, 118, 119, 120, 121, 122, 123, 124, 125, 126, 127, 128, 129, 130, 131, 132, 133, 134, 135, 136, 137, 138, 139, 140, 141, 142, 143, 144, 145, 146, 147, 148, 149, 150, 151, 152, 153, 154, 155, 156, 157, 158, 159, 160, 161, 162, 163, 164, 165, 166, 167, 168, 169, 170, 171, 172, 173, 174, 175, 176, 177, 178, 179, 180, 181, 182, 183, 184, 185, 186, 187, 188, 189, 190, 191, 192, 193, 194, 195, 196, 197, 198, 199, 200, 201, 202, 203, 204, 205, 206, 207, 208, 209, 210, 211, 212, 213, 214, 215, 216, 217, 218, 219, 220, 221, 222, 223, 224, 225, 226, 227, 228, 229, 230, 231, 232, 233, 234, 235, 236, 237, 238, 239, 240, 241, 242, 243, 244, 245, 246, 247, 248, 249, 250, 251, 252, 253, 254, 255, 256, 257, 258, 259, 260, 261, 262, 263, 264, 265, 266, 267, 268, 269, 270, 271, 272, 273, 274, 275, 276, 277, 278, 279, 280, 281, 282, 283, 284, 285, 286, 287, 288, 289, 290, 291, 292, 293, 294, 295, 296, 297, 298, 299, 300, 301, 302, 303, 304, 305, 306, 307, 308, 309, 310, 311, 312, 313, 314, 315, 316, 317, 318, 319, 320, 321, 322, 323, 324, 325, 326, 327, 328, 329, 330, 331, 332, 333, 334, 335, 336, 337, 338, 339, 340, 341, 342, 343, 344, 345, 346, 347, 348, 349, 350, 351, 352, 353, 354, 355, 356, 357, 358, 359, 360, 361, 362, 363, 364, 365, 366, 367, 368, 369, 370, 371, 372, 373, 374, 375, 376, 377, 378, 379, 380, 381, 382, 383, 384, 385, 386, 387, 388, 389, 390, 391, 392, 393, 394, 395, 396, 397, 398, 399, 400, 401, 402, 403, 404, 405, 406, 407, 408, 409, 410, 411, 412, 413, 414, 415, 416, 417, 418, 419, 420, 421, 422, 423, 424, 425, 426, 427, 428, 429, 430, 431, 432, 433, 434, 435, 436, 437, 438, 439, 440, 441, 442, 443, 444, 445, 446, 447, 448, 449, 450, 451, 452, 453, 454, 455, 456, 457, and/or 458; or
(b) a polypeptide comprising the amino acid sequence set forth in SEQ ID NOs: 1, 2, 3, 4, 5, 6, 7, 8, 9, 10, 11, 12, 13, 14, 15, 16, 17, 18, 19, 20, 21, 22, 23, 24, 25, 26, 27, 28, 29, 30, 31, 32, 33, 34, 35, 36, 37, 38, 39, 40, 41, 42, 43, 44, 45, 46, 47, 48, 49, 50, 51, 52, 53, 54, 55, 56, 57, 58, 59, 60, 61, 62, 63, 64, 65, 66, 67, 68, 69, 70, 71, 72, 73, 74, 75, 76, 77, 78, 79, 80, 81, 82, 83, 84, 85, 86, 87, 88, 89, 90, 91, 92, 93, 94, 95, 96, 97, 98, 99, 100, 101, 102, 103, 104, 105, 106, 107, 108, 109, 110, 111, 112, 113, 114, 115, 116, 117, 118, 119, 120, 121, 122, 123, 124, 125, 126, 127, 128, 129, 130, 131, 132, 133, 134, 135, 136, 137, 138, 139, 140, 141, 142, 143, 144, 145, 146, 147, 148, 149, 150, 151, 152, 153, 154, 155, 156, 157, 158, 159, 160, 161, 162, 163, 164, 165, 166, 167, 168, 169, 170, 171, 172, 173, 174, 175, 176, 177, 178, 179, 180, 181, 182, 183, 184, 185, 186, 187, 188, 189, 190, 191, 192, 193, 194, 195, 196, 197, 198, 199, 200, 201, 202, 203, 204, 205, 206, 207, 208, 209, 210, 211, 212, 213, 214, 215, 216, 217, 218, 219, 220, 221, 222, 223, 224, 225, 226, 227, 228, 229, 230, 231, 232, 233, 234, 235, 236, 237, 238, 239, 240, 241, 242, 243, 244, 245, 246, 247, 248, 249, 250, 251, 252, 253, 254, 255, 256, 257, 258, 259, 260, 261, 262, 263, 264, 265, 266, 267, 268, 269, 270, 271, 272, 273, 274, 275, 276, 277, 278, 279, 280, 281, 282, 283, 284, 285, 286, 287, 288, 289, 290, 291, 292, 293, 294, 295, 296, 297, 298, 299, 300, 301, 302, 303, 304, 305, 306, 307, 308, 309, 310, 311, 312, 313, 314, 315, 316, 317, 318, 319, 320, 321, 322, 323, 324, 325, 326, 327, 328, 329, 330, 331, 332, 333, 334, 335, 336, 337, 338, 339, 340, 341, 342, 343, 344, 345, 346, 347, 348, 349, 350, 351, 352, 353, 354, 355, 356, 357, 358, 359, 360, 361, 362, 363, 364, 365, 366, 367, 368, 369, 370, 371, 372, 373, 374, 375, 376, 377, 378, 379, 380, 381, 382, 383, 384, 385, 386, 387, 388, 389, 390, 391, 392, 393, 394, 395, 396, 397, 398, 399, 400, 401, 402, 403, 404, 405, 406, 407, 408, 409, 410, 411, 412, 413, 414, 415, 416, 417, 418, 419, 420, 421, 422, 423, 424, 425, 426, 427, 428, 429, 430, 431, 432, 433, 434, 435, 436, 437, 438, 439, 440, 441, 442, 443, 444, 445, 446, 447, 448, 449, 450, 451, 452, 453, 454, 455, 456, 457, or 458.

2. The polypeptide of claim 1, further comprising a heterologous amino acid sequence.

3. A composition comprising the polypeptide of claim 1.

4. A recombinant nucleic acid molecule encoding an amino acid sequence comprising:
(a) at least 90% percent sequence identity to an amino acid sequence selected from the group consisting of sequences set forth in SEQ ID Nos: 1, 2, 3, 4, 5, 6, 7, 8, 9, 10, 11, 12, 13, 14, 15, 16, 17, 18, 19, 20, 21, 22, 23, 24, 25, 26, 27, 28, 29, 30, 31, 32, 33, 34, 35, 36, 37, 38, 39, 40, 41, 42, 43, 44, 45, 46, 47, 48, 49, 50, 51, 52, 53, 54, 55, 56, 57, 58, 59, 60, 61, 62, 63, 64, 65, 66, 67, 68, 69, 70, 71, 72, 73, 74, 75, 76, 77, 78, 79, 80, 81, 82, 83, 84, 85, 86, 87, 88, 89, 90, 91, 92, 93, 94, 95, 96, 97, 98, 99, 100, 101, 102, 103, 104, 105, 106, 107, 108, 109, 110, 111, 112, 113, 114, 115, 116, 117, 118, 119, 120, 121, 122, 123, 124, 125, 126, 127, 128, 129, 130, 131, 132, 133, 134, 135, 136, 137, 138, 139, 140, 141, 142, 143, 144, 145, 146, 147, 148, 149, 150, 151, 152, 153, 154, 155, 156, 157, 158, 159, 160, 161, 162, 163, 164, 165, 166, 167, 168, 169, 170, 171, 172, 173, 174, 175, 176, 177, 178, 179, 180, 181, 182, 183, 184, 185, 186, 187, 188, 189, 190, 191, 192, 193, 194, 195, 196, 197, 198, 199, 200, 201, 202, 203, 204, 205, 206, 207, 208, 209, 210, 211, 212, 213, 214, 215, 216, 217, 218, 219, 220, 221, 222, 223, 224, 225, 226, 227, 228, 229, 230, 231, 232, 233, 234, 235, 236, 237, 238, 239, 240, 241, 242, 243, 244, 245, 246, 247, 248, 249, 250, 251, 252, 253, 254, 255, 256, 257, 258, 259, 260, 261, 262, 263, 264, 265, 266, 267, 268, 269, 270, 271, 272, 273, 274, 275, 276, 277, 278, 279, 280, 281, 282, 283, 284, 285, 286, 287, 288, 289, 290, 291, 292, 293, 294, 295, 296, 297, 298, 299, 300, 301, 302, 303, 304, 305, 306, 307, 308, 309, 310, 311, 312, 313, 314, 315, 316, 317, 318, 319, 320, 321, 322, 323, 324, 325, 326, 327, 328, 329, 330, 331, 332, 333, 334, 335, 336, 337, 338, 339, 340, 341, 342, 343, 344, 345, 346, 347, 348, 349, 350, 351, 352, 353, 354, 355, 356, 357, 358, 359, 360, 361, 362, 363, 364, 365, 366, 367, 368, 369, 370, 371, 372, 373, 374, 375, 376, 377, 378, 379, 380, 381, 382, 383, 384, 385, 386, 387, 388, 389, 390, 391, 392, 393, 394, 395, 396, 397, 398, 399, 400, 401, 402, 403, 404, 405, 406, 407, 408, 409, 410, 411, 412, 413, 414, 415, 416, 417, 418, 419, 420, 421, 422, 423, 424, 425, 426, 427, 428, 429, 430, 431, 432, 433, 434, 435, 436, 437, 438, 439, 440, 441, 442, 443, 444, 445, 446, 447, 448, 449, 450, 451, 452, 453, 454, 455, 456, 457, or 458; or
(b) the amino acid sequence set forth in SEQ ID NOs: 1, 2, 3, 4, 5, 6, 7, 8, 9, 10, 11, 12, 13, 14, 15, 16, 17, 18, 19, 20, 21, 22, 23, 24, 25, 26, 27, 28, 29, 30, 31, 32, 33, 34, 35, 36, 37, 38, 39, 40, 41, 42, 43, 44, 45, 46, 47, 48, 49, 50, 51, 52, 53, 54, 55, 56, 57, 58, 59, 60, 61, 62, 63, 64, 65, 66, 67, 68, 69, 70, 71, 72, 73, 74, 75, 76, 77, 78, 79, 80, 81, 82, 83, 84, 85, 86, 87, 88, 89, 90, 91, 92, 93, 94, 95, 96, 97, 98, 99, 100, 101, 102, 103, 104, 105, 106, 107, 108, 109, 110, 111, 112, 113, 114, 115, 116, 117, 118, 119, 120, 121, 122, 123, 124, 125, 126, 127, 128, 129, 130, 131, 132, 133, 134, 135, 136, 137, 138, 139, 140, 141, 142, 143, 144, 145, 146, 147, 148, 149, 150, 151, 152, 153, 154, 155, 156, 157, 158, 159, 160, 161, 162, 163, 164, 165, 166, 167, 168, 169, 170, 171, 172, 173, 174, 175, 176, 177, 178, 179, 180, 181, 182, 183, 184, 185, 186, 187, 188, 189, 190, 191, 192, 193, 194, 195, 196, 197, 198, 199, 200, 201, 202, 203, 204, 205, 206, 207, 208, 209, 210, 211, 212, 213, 214, 215, 216, 217, 218, 219, 220, 221, 222, 223, 224, 225, 226, 227, 228, 229, 230, 231, 232, 233, 234, 235, 236, 237, 238, 239, 240, 241, 242, 243, 244, 245, 246, 247, 248, 249, 250, 251, 252, 253, 254, 255, 256, 257, 258, 259, 260, 261, 262, 263, 264, 265, 266, 267, 268, 269, 270, 271, 272, 273, 274, 275, 276, 277, 278, 279, 280, 281, 282, 283, 284, 285, 286, 287, 288, 289, 290, 291, 292, 293, 294, 295, 296, 297, 298, 299, 300, 301, 302, 303, 304, 305, 306, 307, 308, 309, 310, 311, 312, 313, 314, 315, 316, 317, 318, 319, 320, 321, 322, 323, 324, 325, 326, 327, 328, 329, 330, 331, 332, 333, 334, 335, 336, 337, 338, 339, 340, 341, 342, 343, 344, 345, 346, 347, 348, 349, 350, 351, 352, 353, 354, 355, 356, 357, 358, 359, 360, 361, 362, 363, 364, 365, 366, 367, 368, 369, 370, 371, 372, 373, 374, 375, 376, 377, 378, 379, 380, 381, 382, 383, 384, 385, 386, 387, 388, 389, 390, 391, 392, 393, 394, 395, 396, 397, 398, 399, 400, 401, 402, 403, 404, 405, 406, 407, 408, 409, 410, 411, 412, 413, 414, 415, 416, 417, 418, 419, 420, 421, 422, 423, 424, 425, 426, 427, 428, 429, 430, 431, 432, 433, 434, 435, 436, 437, 438, 439, 440, 441, 442, 443, 444, 445, 446, 447, 448, 449, 450, 451, 452, 453, 454, 455, 456, 457, or 458;
wherein said recombinant nucleic acid molecule is not a naturally occurring sequence encoding said polypeptide.

5. The recombinant nucleic acid molecule of claim 4, wherein said recombinant nucleic acid molecule is operably linked to a promoter capable of directing expression in a plant cell.

6. A host cell comprising the recombinant nucleic acid molecule of claim 4.

7. A DNA construct comprising a promoter that drives expression in a plant cell operably linked to a recombinant nucleic acid molecule comprising
(a) a nucleotide sequence that encodes a polypeptide comprising an amino acid sequence having at least 90% percent sequence identity to an amino acid sequence selected from the group consisting of sequences set forth in SEQ ID NOs: 1, 2, 3, 4, 5, 6, 7, 8, 9, 10, 11, 12, 13, 14, 15, 16, 17, 18, 19, 20, 21, 22, 23, 24, 25, 26, 27, 28, 29, 30, 31, 32, 33, 34, 35, 36, 37, 38, 39, 40, 41, 42, 43, 44, 45, 46, 47, 48, 49, 50, 51, 52, 53, 54, 55, 56, 57, 58, 59, 60, 61, 62, 63, 64, 65, 66, 67, 68, 69, 70, 71, 72, 73, 74, 75, 76, 77, 78, 79, 80, 81, 82, 83, 84, 85, 86, 87, 88, 89, 90, 91, 92, 93, 94, 95, 96, 97, 98, 99, 100, 101, 102, 103, 104, 105, 106, 107, 108, 109, 110, 111, 112, 113, 114, 115, 116, 117, 118, 119, 120, 121, 122, 123, 124, 125, 126, 127, 128, 129, 130, 131, 132, 133, 134, 135, 136, 137, 138, 139, 140, 141, 142, 143, 144, 145, 146, 147, 148, 149, 150, 151, 152, 153, 154, 155, 156, 157, 158, 159, 160, 161, 162, 163, 164, 165, 166, 167, 168, 169, 170, 171, 172, 173, 174, 175, 176, 177, 178, 179, 180, 181, 182, 183, 184, 185, 186, 187, 188, 189, 190, 191, 192, 193, 194, 195, 196, 197, 198, 199, 200, 201, 202, 203, 204, 205, 206, 207, 208, 209, 210, 211, 212, 213, 214, 215, 216, 217, 218, 219, 220, 221, 222, 223, 224, 225, 226, 227, 228, 229, 230, 231, 232, 233, 234, 235, 236, 237, 238, 239, 240, 241, 242, 243, 244, 245, 246, 247, 248, 249, 250, 251, 252, 253, 254, 255, 256, 257, 258, 259, 260, 261, 262, 263, 264, 265, 266, 267, 268, 269, 270, 271, 272, 273, 274, 275, 276, 277, 278, 279, 280, 281, 282, 283, 284, 285, 286, 287, 288, 289, 290, 291, 292, 293, 294, 295, 296, 297, 298, 299, 300, 301, 302, 303, 304, 305, 306, 307, 308, 309, 310, 311, 312, 313, 314, 315, 316, 317, 318, 319, 320, 321, 322, 323, 324, 325, 326, 327, 328, 329, 330, 331, 332, 333, 334, 335, 336, 337, 338, 339, 340, 341, 342, 343, 344, 345, 346, 347, 348, 349, 350, 351, 352, 353, 354, 355, 356, 357, 358, 359, 360, 361, 362, 363, 364, 365, 366, 367, 368, 369, 370, 371, 372, 373, 374, 375, 376, 377, 378, 379, 380, 381, 382, 383, 384, 385, 386, 387, 388, 389, 390, 391, 392, 393, 394, 395, 396, 397, 398, 399, 400, 401, 402, 403, 404, 405, 406, 407, 408, 409, 410, 411, 412, 413, 414, 415, 416, 417, 418, 419, 420, 421, 422, 423, 424, 425, 426, 427, 428, 429, 430, 431, 432, 433, 434, 435, 436, 437, 438, 439, 440, 441, 442, 443, 444, 445, 446, 447, 448, 449, 450, 451, 452, 453, 454, 455, 456, 457, or 458; or,
(b) a nucleotide sequence that encodes a polypeptide comprising an amino acid sequence selected from the group consisting of sequences set forth in SEQ ID NOs: 1, 2, 3, 4, 5, 6, 7, 8, 9, 10, 11, 12, 13, 14, 15, 16, 17, 18, 19, 20, 21, 22, 23, 24, 25, 26, 27, 28, 29, 30, 31, 32, 33, 34, 35, 36, 37, 38, 39, 40, 41, 42, 43, 44, 45, 46, 47, 48, 49, 50, 51, 52, 53, 54, 55, 56, 57, 58, 59, 60, 61, 62, 63, 64, 65, 66, 67, 68, 69, 70, 71, 72, 73, 74, 75, 76, 77, 78, 79, 80, 81, 82, 83, 84, 85, 86, 87, 88, 89, 90, 91, 92, 93, 94, 95, 96, 97, 98, 99, 100, 101, 102, 103, 104, 105, 106, 107, 108, 109, 110, 111, 112, 113, 114, 115, 116, 117, 118, 119, 120, 121, 122, 123, 124, 125, 126, 127, 128, 129, 130, 131, 132, 133, 134, 135, 136, 137, 138, 139, 140, 141, 142, 143, 144, 145, 146, 147, 148, 149, 150, 151, 152, 153, 154, 155, 156, 157, 158, 159, 160, 161, 162, 163, 164, 165, 166, 167, 168, 169, 170, 171, 172, 173, 174, 175, 176, 177, 178, 179, 180, 181, 182, 183, 184, 185, 186, 187, 188, 189, 190, 191, 192, 193, 194, 195, 196, 197, 198, 199, 200, 201, 202, 203, 204, 205, 206, 207, 208, 209, 210, 211, 212, 213, 214, 215, 216, 217, 218, 219, 220, 221, 222, 223, 224, 225, 226, 227, 228, 229, 230, 231, 232, 233, 234, 235, 236, 237, 238, 239, 240, 241, 242, 243, 244, 245, 246, 247, 248, 249, 250, 251, 252, 253, 254, 255, 256, 257, 258, 259, 260, 261, 262, 263, 264, 265, 266, 267, 268, 269, 270, 271, 272, 273, 274, 275, 276, 277, 278, 279, 280, 281, 282, 283, 284, 285, 286, 287, 288, 289, 290, 291, 292, 293, 294, 295, 296, 297, 298, 299, 300, 301, 302, 303, 304, 305, 306, 307, 308, 309, 310, 311, 312, 313, 314, 315, 316, 317, 318, 319, 320, 321, 322, 323, 324, 325, 326, 327, 328, 329, 330, 331, 332, 333, 334, 335, 336, 337, 338, 339, 340, 341, 342, 343, 344, 345, 346, 347, 348, 349, 350, 351, 352, 353, 354, 355, 356, 357, 358, 359, 360, 361, 362, 363, 364, 365, 366, 367, 368, 369, 370, 371, 372, 373, 374, 375, 376, 377, 378, 379, 380, 381, 382, 383, 384, 385, 386, 387, 388, 389, 390, 391, 392, 393, 394, 395, 396, 397, 398, 399, 400, 401, 402, 403, 404, 405, 406, 407, 408, 409, 410, 411, 412, 413, 414, 415, 416, 417, 418, 419, 420, 421, 422, 423, 424, 425, 426, 427, 428, 429, 430, 431, 432, 433, 434, 435, 436, 437, 438, 439, 440, 441, 442, 443, 444, 445, 446, 447, 448, 449, 450, 451, 452, 453, 454, 455, 456, 457, and 458.

8. A vector comprising the DNA construct of claim 7.

9. A host cell comprising the vector of claim 8.

10. A transgenic plant comprising the host cell of claim 9.

11. A composition comprising the host cell of claim 6.

12. The composition of claim 11, wherein said composition is selected from the group consisting of a powder, dust, pellet, granule, spray, emulsion, colloid, and solution.

13. A method for controlling a pest population comprising contacting said population with a pesticidal-effective amount of the composition of claim 11.

14. A method for killing a pest population comprising contacting said population with a pesticidal-effective amount of the composition of claim 11.

15. A method for producing a polypeptide with pesticidal activity, comprising culturing the host cell of claim 6 under conditions in which the nucleic acid molecule encoding the polypeptide is expressed.

16. A plant having stably incorporated into its genome a DNA construct comprising a nucleotide sequence that encodes a protein having pesticidal activity, wherein said nucleotide sequence comprises
(a) a nucleotide sequence that encodes a polypeptide comprising the amino acid sequence of any one of SEQ ID NOs: 1, 2, 3, 4, 5, 6, 7, 8, 9, 10, 11, 12, 13, 14, 15, 16, 17, 18, 19, 20, 21, 22, 23, 24, 25, 26, 27, 28, 29, 30, 31, 32, 33, 34, 35, 36, 37, 38, 39, 40, 41, 42, 43, 44, 45, 46, 47, 48, 49, 50, 51, 52, 53, 54, 55, 56, 57, 58, 59, 60, 61, 62, 63, 64, 65, 66, 67, 68, 69, 70, 71, 72, 73, 74, 75, 76, 77, 78, 79, 80, 81, 82, 83, 84, 85, 86, 87, 88, 89, 90, 91, 92, 93, 94, 95, 96, 97, 98, 99, 100, 101, 102, 103, 104, 105, 106, 107, 108, 109, 110, 111, 112, 113, 114, 115, 116, 117, 118, 119, 120, 121, 122, 123, 124, 125, 126, 127, 128, 129, 130, 131, 132, 133, 134, 135, 136, 137, 138, 139, 140, 141, 142, 143, 144, 145, 146, 147, 148, 149, 150, 151, 152, 153, 154, 155, 156, 157, 158, 159, 160, 161, 162, 163, 164, 165, 166, 167, 168, 169, 170, 171, 172, 173, 174, 175, 176, 177, 178, 179, 180, 181, 182, 183, 184, 185, 186, 187, 188, 189, 190, 191, 192, 193, 194, 195, 196, 197, 198, 199, 200, 201, 202, 203, 204, 205, 206, 207, 208, 209, 210, 211, 212, 213, 214, 215, 216, 217, 218, 219, 220, 221, 222, 223, 224, 225, 226, 227, 228, 229, 230, 231, 232, 233, 234, 235, 236, 237, 238, 239, 240, 241, 242, 243, 244, 245, 246, 247, 248, 249, 250, 251, 252, 253, 254, 255, 256, 257, 258, 259, 260, 261, 262, 263, 264, 265, 266, 267, 268, 269, 270, 271, 272, 273, 274, 275, 276, 277, 278, 279, 280, 281, 282, 283, 284, 285, 286, 287, 288, 289, 290, 291, 292, 293, 294, 295, 296, 297, 298, 299, 300, 301, 302, 303, 304, 305, 306, 307, 308, 309, 310, 311, 312, 313, 314, 315, 316, 317, 318, 319, 320, 321, 322, 323, 324, 325, 326, 327, 328, 329, 330, 331, 332, 333, 334, 335, 336, 337, 338, 339, 340, 341, 342, 343, 344, 345, 346, 347, 348, 349, 350, 351, 352, 353, 354, 355, 356, 357, 358, 359, 360, 361, 362, 363, 364, 365, 366, 367, 368, 369, 370, 371, 372, 373, 374, 375, 376, 377, 378, 379, 380, 381, 382, 383, 384, 385, 386, 387, 388, 389, 390, 391, 392, 393, 394, 395, 396, 397, 398, 399, 400, 401, 402, 403, 404, 405, 406, 407, 408, 409, 410, 411, 412, 413, 414, 415, 416, 417, 418, 419, 420, 421, 422, 423, 424, 425, 426, 427, 428, 429, 430, 431, 432, 433, 434, 435, 436, 437, 438, 439, 440, 441, 442, 443, 444, 445, 446, 447, 448, 449, 450, 451, 452, 453, 454, 455, 456, 457, and/or 458; or,
(b) a nucleotide sequence that encodes a polypeptide comprising an amino acid sequence having at least 90% percent sequence identity to an amino acid sequence selected from the group consisting of sequences set forth in SEQ ID NOs: 1, 2, 3, 4, 5, 6, 7, 8, 9, 10, 11, 12, 13, 14, 15, 16, 17, 18, 19, 20, 21, 22, 23, 24, 25, 26, 27, 28, 29, 30, 31, 32, 33, 34, 35, 36, 37, 38, 39, 40, 41, 42, 43, 44, 45, 46, 47, 48, 49, 50, 51, 52, 53, 54, 55, 56, 57, 58, 59, 60, 61, 62, 63, 64, 65, 66, 67, 68, 69, 70, 71, 72, 73, 74, 75, 76, 77, 78, 79, 80, 81, 82, 83, 84, 85, 86, 87, 88, 89, 90, 91, 92, 93, 94, 95, 96, 97, 98, 99, 100, 101, 102, 103, 104, 105, 106, 107, 108, 109, 110, 111, 112, 113, 114, 115, 116, 117, 118, 119, 120, 121, 122, 123, 124, 125, 126, 127, 128, 129, 130, 131, 132, 133, 134, 135, 136, 137, 138, 139, 140, 141, 142, 143, 144, 145, 146, 147, 148, 149, 150, 151, 152, 153, 154, 155, 156, 157, 158, 159, 160, 161, 162, 163, 164, 165, 166, 167, 168, 169, 170, 171, 172, 173, 174, 175, 176, 177, 178, 179, 180, 181, 182, 183, 184, 185, 186, 187, 188, 189, 190, 191, 192, 193, 194, 195, 196, 197, 198, 199, 200, 201, 202, 203, 204, 205, 206, 207, 208, 209, 210, 211, 212, 213, 214, 215, 216, 217, 218, 219, 220, 221, 222, 223, 224, 225, 226, 227, 228, 229, 230, 231, 232, 233, 234, 235, 236, 237, 238, 239, 240, 241, 242, 243, 244, 245, 246, 247, 248, 249, 250, 251, 252, 253, 254, 255, 256, 257, 258, 259, 260, 261, 262, 263, 264, 265, 266, 267, 268, 269, 270, 271, 272, 273, 274, 275, 276, 277, 278, 279, 280, 281, 282, 283, 284, 285, 286, 287, 288, 289, 290, 291, 292, 293, 294, 295, 296, 297, 298, 299, 300, 301, 302, 303, 304, 305, 306, 307, 308, 309, 310, 311, 312, 313, 314, 315, 316, 317, 318, 319, 320, 321, 322, 323, 324, 325, 326, 327, 328, 329, 330, 331, 332, 333, 334, 335, 336, 337, 338, 339, 340, 341, 342, 343, 344, 345, 346, 347, 348, 349, 350, 351, 352, 353, 354, 355, 356, 357, 358, 359, 360, 361, 362, 363, 364, 365, 366, 367, 368, 369, 370, 371, 372, 373, 374, 375, 376, 377, 378, 379, 380, 381, 382, 383, 384, 385, 386, 387, 388, 389, 390, 391, 392, 393, 394, 395, 396, 397, 398, 399, 400, 401, 402, 403, 404, 405, 406, 407, 408, 409, 410, 411, 412, 413, 414, 415, 416, 417, 418, 419, 420, 421, 422, 423, 424, 425, 426, 427, 428, 429, 430, 431, 432, 433, 434, 435, 436, 437, 438, 439, 440, 441, 442, 443, 444, 445, 446, 447, 448, 449, 450, 451, 452, 453, 454, 455, 456, 457, and 458.

17. A transgenic seed of the plant of claim 16.

18. A method for protecting a plant from an insect pest, comprising expressing in a plant or cell thereof a nucleotide sequence that encodes a pesticidal polypeptide, wherein said nucleotide sequence comprising
(a) a nucleotide sequence that encodes a polypeptide comprising the amino acid sequence of any one of SEQ ID NOs: 1, 2, 3, 4, 5, 6, 7, 8, 9, 10, 11, 12, 13, 14, 15, 16, 17, 18, 19, 20, 21, 22, 23, 24, 25, 26, 27, 28, 29, 30, 31, 32, 33, 34, 35, 36, 37, 38, 39, 40, 41, 42, 43, 44, 45, 46, 47, 48, 49, 50, 51, 52, 53, 54, 55, 56, 57, 58, 59, 60, 61, 62, 63, 64, 65, 66, 67, 68, 69, 70, 71, 72, 73, 74, 75, 76, 77, 78, 79, 80, 81, 82, 83, 84, 85, 86, 87, 88, 89, 90, 91, 92, 93, 94, 95, 96, 97, 98, 99, 100, 101, 102, 103, 104, 105, 106, 107, 108, 109, 110, 111, 112, 113, 114, 115, 116, 117, 118, 119, 120, 121, 122, 123, 124, 125, 126, 127, 128, 129, 130, 131, 132, 133, 134, 135, 136, 137, 138, 139, 140, 141, 142, 143, 144, 145, 146, 147, 148, 149, 150, 151, 152, 153, 154, 155, 156, 157, 158, 159, 160, 161, 162, 163, 164, 165, 166, 167, 168, 169, 170, 171, 172, 173, 174, 175, 176, 177, 178, 179, 180, 181, 182, 183, 184, 185, 186, 187, 188, 189, 190, 191, 192, 193, 194, 195, 196, 197, 198, 199, 200, 201, 202, 203, 204, 205, 206, 207, 208, 209, 210, 211, 212, 213, 214, 215, 216, 217, 218, 219, 220, 221, 222, 223, 224, 225, 226, 227, 228, 229, 230, 231, 232, 233, 234, 235, 236, 237, 238, 239, 240, 241, 242, 243, 244, 245, 246, 247, 248, 249, 250, 251, 252, 253, 254, 255, 256, 257, 258, 259, 260, 261, 262, 263, 264, 265, 266, 267, 268, 269, 270, 271, 272, 273, 274, 275, 276, 277, 278, 279, 280, 281, 282, 283, 284, 285, 286, 287, 288, 289, 290, 291, 292, 293, 294, 295, 296, 297, 298, 299, 300, 301, 302, 303, 304, 305, 306, 307, 308, 309, 310, 311, 312, 313, 314, 315, 316, 317, 318, 319, 320, 321, 322, 323, 324, 325, 326, 327, 328, 329, 330, 331, 332, 333, 334, 335, 336, 337, 338, 339, 340, 341, 342, 343, 344, 345, 346, 347, 348, 349, 350, 351, 352, 353, 354, 355, 356, 357, 358, 359, 360, 361, 362, 363, 364, 365, 366, 367, 368, 369, 370, 371, 372, 373, 374, 375, 376, 377, 378, 379, 380, 381, 382, 383, 384, 385, 386, 387, 388, 389, 390, 391, 392, 393, 394, 395, 396, 397, 398, 399, 400, 401, 402, 403, 404, 405, 406, 407, 408, 409, 410, 411, 412, 413, 414, 415, 416, 417, 418, 419, 420, 421, 422, 423, 424, 425, 426, 427, 428, 429, 430, 431, 432, 433, 434, 435, 436, 437, 438, 439, 440, 441, 442, 443, 444, 445, 446, 447, 448, 449, 450, 451, 452, 453, 454, 455, 456, 457, and/or 458; or,
(b) a nucleotide sequence that encodes a polypeptide comprising an amino acid sequence having at least 90% percent sequence identity to an amino acid sequence selected from the group consisting of sequences set forth in SEQ ID NOs: 1, 2, 3, 4, 5, 6, 7, 8, 9, 10, 11, 12, 13, 14, 15, 16, 17, 18, 19, 20, 21, 22, 23, 24, 25, 26, 27, 28, 29, 30, 31, 32, 33, 34, 35, 36, 37, 38, 39, 40, 41, 42, 43, 44, 45, 46, 47, 48, 49, 50, 51, 52, 53, 54, 55, 56, 57, 58, 59, 60, 61, 62, 63, 64, 65, 66, 67, 68, 69, 70, 71, 72, 73, 74, 75, 76, 77, 78, 79, 80, 81, 82, 83, 84, 85, 86, 87, 88, 89, 90, 91, 92, 93, 94, 95, 96, 97, 98, 99, 100, 101, 102, 103, 104, 105, 106, 107, 108, 109, 110, 111, 112, 113, 114, 115, 116, 117, 118, 119, 120, 121, 122, 123, 124, 125, 126, 127, 128, 129, 130, 131, 132, 133, 134, 135, 136, 137, 138, 139, 140, 141, 142, 143, 144, 145, 146, 147, 148, 149, 150, 151, 152, 153, 154, 155, 156, 157, 158, 159, 160, 161, 162, 163, 164, 165, 166, 167, 168, 169, 170, 171, 172, 173, 174, 175, 176, 177, 178, 179, 180, 181, 182, 183, 184, 185, 186, 187, 188, 189, 190, 191, 192, 193, 194, 195, 196, 197, 198, 199, 200, 201, 202, 203, 204, 205, 206, 207, 208, 209, 210, 211, 212, 213, 214, 215, 216, 217, 218, 219, 220, 221, 222, 223, 224, 225, 226, 227, 228, 229, 230, 231, 232, 233, 234, 235, 236, 237, 238, 239, 240, 241, 242, 243, 244, 245, 246, 247, 248, 249, 250, 251, 252, 253, 254, 255, 256, 257, 258, 259, 260, 261, 262, 263, 264, 265, 266, 267, 268, 269, 270, 271, 272, 273, 274, 275, 276, 277, 278, 279, 280, 281, 282, 283, 284, 285, 286, 287, 288, 289, 290, 291, 292, 293, 294, 295, 296, 297, 298, 299, 300, 301, 302, 303, 304, 305, 306, 307, 308, 309, 310, 311, 312, 313, 314, 315, 316, 317, 318, 319, 320, 321, 322, 323, 324, 325, 326, 327, 328, 329, 330, 331, 332, 333, 334, 335, 336, 337, 338, 339, 340, 341, 342, 343, 344, 345, 346, 347, 348, 349, 350, 351, 352, 353, 354, 355, 356, 357, 358, 359, 360, 361, 362, 363, 364, 365, 366, 367, 368, 369, 370, 371, 372, 373, 374, 375, 376, 377, 378, 379, 380, 381, 382, 383, 384, 385, 386, 387, 388, 389, 390, 391, 392, 393, 394, 395, 396, 397, 398, 399, 400, 401, 402, 403, 404, 405, 406, 407, 408, 409, 410, 411, 412, 413, 414, 415, 416, 417, 418, 419, 420, 421, 422, 423, 424, 425, 426, 427, 428, 429, 430, 431, 432, 433, 434, 435, 436, 437, 438, 439, 440, 441, 442, 443, 444, 445, 446, 447, 448, 449, 450, 451, 452, 453, 454, 455, 456, 457, and 458.

19. A method for increasing yield in a plant comprising growing in a field a plant or seed thereof having stably incorporated into its genome a DNA construct comprising a promoter that drives expression in a plant operably linked to a nucleotide sequence that encodes a pesticidal polypeptide, wherein said nucleotide sequence comprises
(a) a nucleotide sequence that encodes a polypeptide comprising the amino acid sequence of any one of SEQ ID NOs: 1, 2, 3, 4, 5, 6, 7, 8, 9, 10, 11, 12, 13, 14, 15, 16, 17, 18, 19, 20, 21, 22, 23, 24, 25, 26, 27, 28, 29, 30, 31, 32, 33, 34, 35, 36, 37, 38, 39, 40, 41, 42, 43, 44, 45, 46, 47, 48, 49, 50, 51, 52, 53, 54, 55, 56, 57, 58, 59, 60, 61, 62, 63, 64, 65, 66, 67, 68, 69, 70, 71, 72, 73, 74, 75, 76, 77, 78, 79, 80, 81, 82, 83, 84, 85, 86, 87, 88, 89, 90, 91, 92, 93, 94, 95, 96, 97, 98, 99, 100, 101, 102, 103, 104, 105, 106, 107, 108, 109, 110, 111, 112, 113, 114, 115, 116, 117, 118, 119, 120, 121, 122, 123, 124, 125, 126, 127, 128, 129, 130, 131, 132, 133, 134, 135, 136, 137, 138, 139, 140, 141, 142, 143, 144, 145, 146, 147, 148, 149, 150, 151, 152, 153, 154, 155, 156, 157, 158, 159, 160, 161, 162, 163, 164, 165, 166, 167, 168, 169, 170, 171, 172, 173, 174, 175, 176, 177, 178, 179, 180, 181, 182, 183, 184, 185, 186, 187, 188, 189, 190, 191, 192, 193, 194, 195, 196, 197, 198, 199, 200, 201, 202, 203, 204, 205, 206, 207, 208, 209, 210, 211, 212, 213, 214, 215, 216, 217, 218, 219, 220, 221, 222, 223, 224, 225, 226, 227, 228, 229, 230, 231, 232, 233, 234, 235, 236, 237, 238, 239, 240, 241, 242, 243, 244, 245, 246, 247, 248, 249, 250, 251, 252, 253, 254, 255, 256, 257, 258, 259, 260, 261, 262, 263, 264, 265, 266, 267, 268, 269, 270, 271, 272, 273, 274, 275, 276, 277, 278, 279, 280, 281, 282, 283, 284, 285, 286, 287, 288, 289, 290, 291, 292, 293, 294, 295, 296, 297, 298, 299, 300, 301, 302, 303, 304, 305, 306, 307, 308, 309, 310, 311, 312, 313, 314, 315, 316, 317, 318, 319, 320, 321, 322, 323, 324, 325, 326, 327, 328, 329, 330, 331, 332, 333, 334, 335, 336, 337, 338, 339, 340, 341, 342, 343, 344, 345, 346, 347, 348, 349, 350, 351, 352, 353, 354, 355, 356, 357, 358, 359, 360, 361, 362, 363, 364, 365, 366, 367, 368, 369, 370, 371, 372, 373, 374, 375, 376, 377, 378, 379, 380, 381, 382, 383, 384, 385, 386, 387, 388, 389, 390, 391, 392, 393, 394, 395, 396, 397, 398, 399, 400, 401, 402, 403, 404, 405, 406, 407, 408, 409, 410, 411, 412, 413, 414, 415, 416, 417, 418, 419, 420, 421, 422, 423, 424, 425, 426, 427, 428, 429, 430, 431, 432, 433, 434, 435, 436, 437, 438, 439, 440, 441, 442, 443, 444, 445, 446, 447, 448, 449, 450, 451, 452, 453, 454, 455, 456, 457, and/or 458; or,
(b) a nucleotide sequence that encodes a polypeptide comprising an amino acid sequence having at least 90% percent sequence identity to an amino acid sequence selected from the group consisting of sequences set forth in SEQ ID NOs: 1, 2, 3, 4, 5, 6, 7, 8, 9, 10, 11, 12, 13, 14, 15, 16, 17, 18, 19, 20, 21, 22, 23, 24, 25, 26, 27, 28, 29, 30, 31, 32, 33, 34, 35, 36, 37, 38, 39, 40, 41, 42, 43, 44, 45, 46, 47, 48, 49, 50, 51, 52, 53, 54, 55, 56, 57, 58, 59, 60, 61, 62, 63, 64, 65, 66, 67, 68, 69, 70, 71, 72, 73, 74, 75, 76, 77, 78, 79, 80, 81, 82, 83, 84, 85, 86, 87, 88, 89, 90, 91, 92, 93, 94, 95, 96, 97, 98, 99, 100, 101, 102, 103, 104, 105, 106, 107, 108, 109, 110, 111, 112, 113, 114, 115, 116, 117, 118, 119, 120, 121, 122, 123, 124, 125, 126, 127, 128, 129, 130, 131, 132, 133, 134, 135, 136, 137, 138, 139, 140, 141, 142, 143, 144, 145, 146, 147, 148, 149, 150, 151, 152, 153, 154, 155, 156, 157, 158, 159, 160, 161, 162, 163, 164, 165, 166, 167, 168, 169, 170, 171, 172, 173, 174, 175, 176, 177, 178, 179, 180, 181, 182, 183, 184, 185, 186, 187, 188, 189, 190, 191, 192, 193, 194, 195, 196, 197, 198, 199, 200, 201, 202, 203, 204, 205, 206, 207, 208, 209, 210, 211, 212, 213, 214, 215, 216, 217, 218, 219, 220, 221, 222, 223, 224, 225, 226, 227, 228, 229, 230, 231, 232, 233, 234, 235, 236, 237, 238, 239, 240, 241, 242, 243, 244, 245, 246, 247, 248, 249, 250, 251, 252, 253, 254, 255, 256, 257, 258, 259, 260, 261, 262, 263, 264, 265, 266, 267, 268, 269, 270, 271, 272, 273, 274, 275, 276, 277, 278, 279, 280, 281, 282, 283, 284, 285, 286, 287, 288, 289, 290, 291, 292, 293, 294, 295, 296, 297, 298, 299, 300, 301, 302, 303, 304, 305, 306, 307, 308, 309, 310, 311, 312, 313, 314, 315, 316, 317, 318, 319, 320, 321, 322, 323, 324, 325, 326, 327, 328, 329, 330, 331, 332, 333, 334, 335, 336, 337, 338, 339, 340, 341, 342, 343, 344, 345, 346, 347, 348, 349, 350, 351, 352, 353, 354, 355, 356, 357, 358, 359, 360, 361, 362, 363, 364, 365, 366, 367, 368, 369, 370, 371, 372, 373, 374, 375, 376, 377, 378, 379, 380, 381, 382, 383, 384, 385, 386, 387, 388, 389, 390, 391, 392, 393, 394, 395, 396, 397, 398, 399, 400, 401, 402, 403, 404, 405, 406, 407, 408, 409, 410, 411, 412, 413, 414, 415, 416, 417, 418, 419, 420, 421, 422, 423, 424, 425, 426, 427, 428, 429, 430, 431, 432, 433, 434, 435, 436, 437, 438, 439, 440, 441, 442, 443, 444, 445, 446, 447, 448, 449, 450, 451, 452, 453, 454, 455, 456, 457, and/or 458.

20. A method of obtaining a polynucleotide that encodes an improved polypeptide comprising pesticidal activity is provided, wherein the improved polypeptide has at least one improved property over any one of SEQ ID NOS: 1, 2, 3, 4, 5, 6, 7, 8, 9, 10, 11, 12, 13, 14, 15, 16, 17, 18, 19, 20, 21, 22, 23, 24, 25, 26, 27, 28, 29, 30, 31, 32, 33, 34, 35, 36, 37, 38, 39, 40, 41, 42, 43, 44, 45, 46, 47, 48, 49, 50, 51, 52, 53, 54, 55, 56, 57, 58, 59, 60, 61, 62, 63, 64, 65, 66, 67, 68, 69, 70, 71, 72, 73, 74, 75, 76, 77, 78, 79, 80, 81, 82, 83, 84, 85, 86, 87, 88, 89, 90, 91, 92, 93, 94, 95, 96, 97, 98, 99, 100, 101, 102, 103, 104, 105, 106, 107, 108, 109, 110, 111, 112, 113, 114, 115, 116, 117, 118, 119, 120, 121, 122, 123, 124, 125, 126, 127, 128, 129, 130, 131, 132, 133, 134, 135, 136, 137, 138, 139, 140, 141, 142, 143, 144, 145, 146, 147, 148, 149, 150, 151, 152, 153, 154, 155, 156, 157, 158, 159, 160, 161, 162, 163, 164, 165, 166, 167, 168, 169, 170, 171, 172, 173, 174, 175, 176, 177, 178, 179, 180, 181, 182, 183, 184, 185, 186, 187, 188, 189, 190, 191, 192, 193, 194, 195, 196, 197, 198, 199, 200, 201, 202, 203, 204, 205, 206, 207, 208, 209, 210, 211, 212, 213, 214, 215, 216, 217, 218, 219, 220, 221, 222, 223, 224, 225, 226, 227, 228, 229, 230, 231, 232, 233, 234, 235, 236, 237, 238, 239, 240, 241, 242, 243, 244, 245, 246, 247, 248, 249, 250, 251, 252, 253, 254, 255, 256, 257, 258, 259, 260, 261, 262, 263, 264, 265, 266, 267, 268, 269, 270, 271, 272, 273, 274, 275, 276, 277, 278, 279, 280, 281, 282, 283, 284, 285, 286, 287, 288, 289, 290, 291, 292, 293, 294, 295, 296, 297, 298, 299, 300, 301, 302, 303, 304, 305, 306, 307, 308, 309, 310, 311, 312, 313, 314, 315, 316, 317, 318, 319, 320, 321, 322, 323, 324, 325, 326, 327, 328, 329, 330, 331, 332, 333, 334, 335, 336, 337, 338, 339, 340, 341, 342, 343, 344, 345, 346, 347, 348, 349, 350, 351, 352, 353, 354, 355, 356, 357, 358, 359, 360, 361, 362, 363, 364, 365, 366, 367, 368, 369, 370, 371, 372, 373, 374, 375, 376, 377, 378, 379, 380, 381, 382, 383, 384, 385, 386, 387, 388, 389, 390, 391, 392, 393, 394, 395, 396, 397, 398, 399, 400, 401, 402, 403, 404, 405, 406, 407, 408, 409, 410, 411, 412, 413, 414, 415, 416, 417, 418, 419, 420, 421, 422, 423, 424, 425, 426, 427, 428, 429, 430, 431, 432, 433, 434, 435, 436, 437, 438, 439, 440, 441, 442, 443, 444, 445, 446, 447, 448, 449, 450, 451, 452, 453, 454, 455, 456, 457, and/or 458 comprising:
(a) recombining a plurality of parental polynucleotides comprising SEQ ID NO: 1, 2, 3, 4, 5, 6, 7, 8, 9, 10, 11, 12, 13, 14, 15, 16, 17, 18, 19, 20, 21, 22, 23, 24, 25, 26, 27, 28, 29, 30, 31, 32, 33, 34, 35, 36, 37, 38, 39, 40, 41, 42, 43, 44, 45, 46, 47, 48, 49, 50, 51, 52, 53, 54, 55, 56, 57, 58, 59, 60, 61, 62, 63, 64, 65, 66, 67, 68, 69, 70, 71, 72, 73, 74, 75, 76, 77, 78, 79, 80, 81, 82, 83, 84, 85, 86, 87, 88, 89, 90, 91, 92, 93, 94, 95, 96, 97, 98, 99, 100, 101, 102, 103, 104, 105, 106, 107, 108, 109, 110, 111, 112, 113, 114, 115, 116, 117, 118, 119, 120, 121, 122, 123, 124, 125, 126, 127, 128, 129, 130, 131, 132, 133, 134, 135, 136, 137, 138, 139, 140, 141, 142, 143, 144, 145, 146, 147, 148, 149, 150, 151, 152, 153, 154, 155, 156, 157, 158, 159, 160, 161, 162, 163, 164, 165, 166, 167, 168, 169, 170, 171, 172, 173, 174, 175, 176, 177, 178, 179, 180, 181, 182, 183, 184, 185, 186, 187, 188, 189, 190, 191, 192, 193, 194, 195, 196, 197, 198, 199, 200, 201, 202, 203, 204, 205, 206, 207, 208, 209, 210, 211, 212, 213, 214, 215, 216, 217, 218, 219, 220, 221, 222, 223, 224, 225, 226, 227, 228, 229, 230, 231, 232, 233, 234, 235, 236, 237, 238, 239, 240, 241, 242, 243, 244, 245, 246, 247, 248, 249, 250, 251, 252, 253, 254, 255, 256, 257, 258, 259, 260, 261, 262, 263, 264, 265, 266, 267, 268, 269, 270, 271, 272, 273, 274, 275, 276, 277, 278, 279, 280, 281, 282, 283, 284, 285, 286, 287, 288, 289, 290, 291, 292, 293, 294, 295, 296, 297, 298, 299, 300, 301, 302, 303, 304, 305, 306, 307, 308, 309, 310, 311, 312, 313, 314, 315, 316, 317, 318, 319, 320, 321, 322, 323, 324, 325, 326, 327, 328, 329, 330, 331, 332, 333, 334, 335, 336, 337, 338, 339, 340, 341, 342, 343, 344, 345, 346, 347, 348, 349, 350, 351, 352, 353, 354, 355, 356, 357, 358, 359, 360, 361, 362, 363, 364, 365, 366, 367, 368, 369, 370, 371, 372, 373, 374, 375, 376, 377, 378, 379, 380, 381, 382, 383, 384, 385, 386, 387, 388, 389, 390, 391, 392, 393, 394, 395, 396, 397, 398, 399, 400, 401, 402, 403, 404, 405, 406, 407, 408, 409, 410, 411, 412, 413, 414, 415, 416, 417, 418, 419, 420, 421, 422, 423, 424, 425, 426, 427, 428, 429, 430, 431, 432, 433, 434, 435, 436, 437, 438, 439, 440, 441, 442, 443, 444, 445, 446, 447, 448, 449, 450, 451, 452, 453, 454, 455, 456, 457, and/or 458 or an active variant or fragment thereof to produce a library of recombinant polynucleotides encoding recombinant pesticidal polypeptides;
(b) screening the library to identify a recombinant polynucleotide that encodes an improved recombinant pesticidal polypeptide that has an enhanced property improved over the parental polynucleotide;
(c) recovering the recombinant polynucleotide that encodes the improved recombinant pesticidal polypeptide identified in (b); and,
(d) repeating steps (a), (b) and (c) using the recombinant polynucleotide recovered in step (c) as one of the plurality of parental polynucleotides in repeated step (a).

The application's sequence listing, which the Patent Office published only in electronic form, follows.

SEQUENCE LISTING (430 sequences)

SEQ ID NO: 1 - protein, 428 aa, Arthrobacter sp
MSIAETSFRAAATKPSQAVYTAIQDADYATHGAPFDPLLIKFAAVSDFANGWASKDWTRKGAGAMRFYQYPGPGSAEDNFRPLGDFALAGLADASRVPVTLVAPLPSREDKLAHPVRFDRILSDSGSGNANDVDYFWPVAPPGFQALGICVGFNGASPNTDNYWCVSNDILQDVPERGYWSDAGTGWKANGSLNVADLTNVTSQDNLMLAPTTFLSVQQGGARARCLVLDKLLLPGAHFAAPEPVYDGQTSQGDETAPGLASVAVVPCNVVADSSSASGPKSSPFYYLASEPYWHCTRGLSSPEGGSYKESVTVGTSSQKSQGFQNTTSLTVGAEVGVEADVFSASMSVSYTQEMQVSVATSDEHSTEVNRTVELNLPKARRVFIWQARTNIVAYRTQGSRDKGPTVLSIAPFAKDDATFVYSGAKEG

SEQ ID NO: 2 - protein, 298 aa, Unknown
  Unknown organism from environmental sample
MAIFDLDTYLLDLFKKVVDSDLEPALRVYTSDLAVKNEEIYGFEIKESKPQGTMFMGESILNNRTNETQTILSDSFTKTITDSVTLSVTNGITTGVNISISGKIFGMGAETSMSIEVSTSTTNEQTNEESIAYTVPSQTVVVPAQTTYYVHTALERNRLEGIIRLRADVSGEIIIFVKFSEDVKWPLLTIDIYDFVNQFQSSLPLPSGISLNHNTKAIHFEGIAEYLYGTGTKFHVTVTDKPSSQGTHEHKSFDAKTGLGTYPIGLNGKKLSLDLNDLKEHMNPKDFEKLKELQNKIV

SEQ ID NO: 3 - protein, 330 aa, Bacillus sp.
MMYKNRKKAKRKYKQAMLVTVATASLGMTVVGGATSTFAAENQSINIDKKITGSYYDGHHAMNMDEFIRWRLDNLADTTYTTIKDLKKENATTKSIDVFEVDNTNSEVPRTIKSQQKTYKATDSVSFTDAKEFSLGQEISAEFGESITGKVAVKLTASQKFSTSETTLHSDEESITYGGDSITAKPGQRIKVEYLYQKNEYSGSLETGRKINTTFNDARMNYLAAGGVEMYKEHGTFPSVPYTYNTAYEFVKDAHKHGGTLFVSYEAKDDTYLIPMEEFKSKTFIDDQKQQAYFKDSSAKFHGVKGTGIIVKITDVNSGKVIDEKKVAAF

SEQ ID NO: 4 - protein, 292 aa, Artificial Sequence
  synthetic
  synthetic (1)..(292)
MAENQSINIDKKITGSYYDGHHAMNMDEFIRWRLDNLADTTYTTIKDLKKENATTKSIDVFEVDNTNSEVPRTIKSQQKTYKATDSVSFTDAKEFSLGQEISAEFGESITGKVAVKLTASQKFSTSETTLHSDEESITYGGDSITAKPGQRIKVEYLYQKNEYSGSLETGRKINTTFNDARMNYLAAGGVEMYKEHGTFPSVPYTYNTAYEFVKDAHKHGGTLFVSYEAKDDTYLIPMEEFKSKTFIDDQKQQAYFKDSSAKFHGVKGTGIIVKITDVNSGKVIDEKKVAAF

SEQ ID NO: 5 - protein, 316 aa, Bacillus sp.
MKKRLLVLTGLVLTMGGTVTGENPVFAAEYSILKKDPAFKVTSSIGYIETNKNWFAQNKIFKFSPYSNSGFKVITTQEKERAIDFAENDNRDNSEPQTVRSAVRSFSQTDSMTLNANVQFNLGQQLSASIELPMIVKISTQFSAQQIIGAGVSKMTSKTETLSYGGDAIEAKPHQLKKVAYIFKERTYFGELNTGTQITGTGPIKVISSGKTFFVDNLEGNDLYGFFKELQQLNDKEKIRIMKVDPRDERAPAFDLLSGHFAENFFIDDTAKTVSTVGNKAMITGISGIGLIMRTTTGNKFGAKLPIVEEKIIKVL

SEQ ID NO: 6 - protein, 290 aa, Artificial Sequence
  Synthetic
MAEYSILKKDPAFKVTSSIGYIETNKNWFAQNKIFKFSPYSNSGFKVITTQEKERAIDFAENDNRDNSEPQTVRSAVRSFSQTDSMTLNANVQFNLGQQLSASIELPMIVKISTQFSAQQIIGAGVSKMTSKTETLSYGGDAIEAKPHQLKKVAYIFKERTYFGELNTGTQITGTGPIKVISSGKTFFVDNLEGNDLYGFFKELQQLNDKEKIRIMKVDPRDERAPAFDLLSGHFAENFFIDDTAKTVSTVGNKAMITGISGIGLIMRTTTGNKFGAKLPIVEEKIIKVL

SEQ ID NO: 7 - protein, 363 aa, Bacillus sp.
MKKYKKLLMVAPLACMLGTGVVTLPTASHADAAPVAQVNDVYQQGSTYSKENITKVLYMRLARGIEASPELRQKFKIADDESVQRENPANSFTDPNGNTTNYPAIDYGLQDQLSKVTVASTGTNITVNPTTVTEVEAGKIELLSYRNVTPLTQKQYTTEKQMKRVDTVTATNQYGFKLGFVSTTAFKVDALVASATQSFTASAEFSFSRTDTNTVTNEETVTFKAQEVLAAAGGTTNYFTRVGKAKFSGSFQTDAALSELKLKLPIVKKNGNGRDVVHTEEVTLTSQDIYTLFKNVPYIPLPAYLSFDDNGKKVLVKNATFDYTGEMGYSTTAQAEFIPFDQNQPKQTMSYEKYETKTQDKSL

SEQ ID NO: 8 - protein, 332 aa, Artificial Sequence
  synthetic
MAPVAQVNDVYQQGSTYSKENITKVLYMRLARGIEASPELRQKFKIADDESVQRENPANSFTDPNGNTTNYPAIDYGLQDQLSKVTVASTGTNITVNPTTVTEVEAGKIELLSYRNVTPLTQKQYTTEKQMKRVDTVTATNQYGFKLGFVSTTAFKVDALVASATQSFTASAEFSFSRTDTNTVTNEETVTFKAQEVLAAAGGTTNYFTRVGKAKFSGSFQTDAALSELKLKLPIVKKNGNGRDVVHTEEVTLTSQDIYTLFKNVPYIPLPAYLSFDDNGKKVLVKNATFDYTGEMGYSTTAQAEFIPFDQNQPKQTMSYEKYETKTQDKSL

SEQ ID NO: 9 - protein, 205 aa, Unknown
  Uknown organism from environmental sample
MNRGTISDKKKSGYSEEEYYLKLISDVKPEYTVQTLNLMDKFKFIVNPMTKELDTSKILQIANEHPDLAIVSTLNQQFTSNQKMPIKNLVDSSKEFVFSAIGGSYLDKGIKKTCINWIENVIVKLNSQIEHPWISFYTEAKNKTSYRYNILFIFQRASFLVMTPISFEITILANKDTVLDLKLTDKAEYHVSIKLIQVIQSLNPW

SEQ ID NO: 10 - protein, 1294 aa, Bacillus sp.
LRNLIDAPVFLDQVIKKIRGGLYMNINDNKNEYEILDSGNLSYQPRYPLARAPGSECQKPNAKDGIYTPVGRVDTALQNIDIGLSIRTAISILQMLLSVSFPALGRAAGLINIIFGFLWGTLAGQSVWEKFMRAVESLVNQKITDAVRVKALSELKGVQNVLELYQEAADDWNENPTDASNKERVRRQFTTTNTTIEYAMPSFQVSTFEVPLLTVYAQAANLHLQLLRDAVKFGNEWGMPSEEVEDMYNRLTRRTAEYTDHCVATYDKGLKEAYDLAPNPTDYNKYPYLNPYSKDPIYGKYYTAPVDWNLFNDYRRDMTLMVLDIVAVWPTYNPRIYTNPNGVQVELSREVYSTVYGRGGSNNSSFDAIESQIVRPPHLVTELTNLKIEQGATLDMEQIQYPKYMKVTNTLHYVGSSSTWEQSSSAIPIRPITQIHTIPANNIGNLSLSQLDVPYRFSFYNKDDALIAAVGAEFPPNTVTWNGIPKAEDSNQNSHHLSYVGALGTQSSAGFPWTYPTELLGEWGFGWLHNSLTPTNEILSDKITQIPAVKAFNIQGNGKVTKGPGSTGGDLIALPAPSGQINIYLKETSTKNYRVRLRYAATTDGQLRVARVRNGGAVRWFENIKYVTTGASENSLAYNQFKYVDIFTSDFSNINSLVFINQSGGTILIDQIEFIPIEGSLEVFEAEQDLENARKAVNALFTGAAKDVLKLNVTDYAVDQASNLVECVSDEFHAQEKMILLDQVKFAKRLSQARNLLNYGDFESSDWSGENGWRTSHHVSVRSDNPTFKGHYLHMPGAMSPQFSNNIYPTYAYQKVDESKLKSYTRYLVRGFVGNSKDLELLVERYGKDVYVEMDVPNDIRYTLPMNECGGFDRCKPASHHTGSPHTCTCKDTAVAHTDCQWKDKENRTSTNMYTNVPTDSAVYMNGSHTHQSCGCKNKNNDRYQNGTHLQKSCGCKDPHVFSYHIDTGCVDLEENLGLWFALKIASENGVANIDNVEIIEAQPLTGEALARVKKREQKWKQEMAQKRFQTDKAVQAAQTAMQALFTNAQYNRLKFETLFPQIVNAKMLVQQIPYMYHPFLSGALPTVPGMNFEIIQRLLAVTGNARGLYEQRNLVRNGTFSSGTGSWHVSEGVKVQPLQNTSVLVLSEWNQEASQQLHIDPDRGYVLRVIARKEGGGKGTVTMSDCAAYTETLTFTSCDFNTSGSQTMTSGTLSGFVTKTLEIFPDTDRIRIDMGETKGTFQIESVELICMEQMEDDLYDMAGNLEEEMLDLGIENINAVTNEMCFSWDIQCP

SEQ ID NO: 11 - protein, 654 aa, Artificial Sequence
  synthetic
MNINDNKNEYEILDSGNLSYQPRYPLARAPGSECQKPNAKDGIYTPVGRVDTALQNIDIGLSIRTAISILQMLLSVSFPALGRAAGLINIIFGFLWGTLAGQSVWEKFMRAVESLVNQKITDAVRVKALSELKGVQNVLELYQEAADDWNENPTDASNKERVRRQFTTTNTTIEYAMPSFQVSTFEVPLLTVYAQAANLHLQLLRDAVKFGNEWGMPSEEVEDMYNRLTRRTAEYTDHCVATYDKGLKEAYDLAPNPTDYNKYPYLNPYSKDPIYGKYYTAPVDWNLFNDYRRDMTLMVLDIVAVWPTYNPRIYTNPNGVQVELSREVYSTVYGRGGSNNSSFDAIESQIVRPPHLVTELTNLKIEQGATLDMEQIQYPKYMKVTNTLHYVGSSSTWEQSSSAIPIRPITQIHTIPANNIGNLSLSQLDVPYRFSFYNKDDALIAAVGAEFPPNTVTWNGIPKAEDSNQNSHHLSYVGALGTQSSAGFPWTYPTELLGEWGFGWLHNSLTPTNEILSDKITQIPAVKAFNIQGNGKVTKGPGSTGGDLIALPAPSGQINIYLKETSTKNYRVRLRYAATTDGQLRVARVRNGGAVRWFENIKYVTTGASENSLAYNQFKYVDIFTSDFSNINSLVFINQSGGTILIDQIEFIPI

SEQ ID NO: 12 - protein, 1271 aa, Artificial Sequence
  synthetic
MNINDNKNEYEILDSGNLSYQPRYPLARAPGSECQKPNAKDGIYTPVGRVDTALQNIDIGLSIRTAISILQMLLSVSFPALGRAAGLINIIFGFLWGTLAGQSVWEKFMRAVESLVNQKITDAVRVKALSELKGVQNVLELYQEAADDWNENPTDASNKERVRRQFTTTNTTIEYAMPSFQVSTFEVPLLTVYAQAANLHLQLLRDAVKFGNEWGMPSEEVEDMYNRLTRRTAEYTDHCVATYDKGLKEAYDLAPNPTDYNKYPYLNPYSKDPIYGKYYTAPVDWNLFNDYRRDMTLMVLDIVAVWPTYNPRIYTNPNGVQVELSREVYSTVYGRGGSNNSSFDAIESQIVRPPHLVTELTNLKIEQGATLDMEQIQYPKYMKVTNTLHYVGSSSTWEQSSSAIPIRPITQIHTIPANNIGNLSLSQLDVPYRFSFYNKDDALIAAVGAEFPPNTVTWNGIPKAEDSNQNSHHLSYVGALGTQSSAGFPWTYPTELLGEWGFGWLHNSLTPTNEILSDKITQIPAVKAFNIQGNGKVTKGPGSTGGDLIALPAPSGQINIYLKETSTKNYRVRLRYAATTDGQLRVARVRNGGAVRWFENIKYVTTGASENSLAYNQFKYVDIFTSDFSNINSLVFINQSGGTILIDQIEFIPIEGSLEVFEAEQDLENARKAVNALFTGAAKDVLKLNVTDYAVDQASNLVECVSDEFHAQEKMILLDQVKFAKRLSQARNLLNYGDFESSDWSGENGWRTSHHVSVRSDNPTFKGHYLHMPGAMSPQFSNNIYPTYAYQKVDESKLKSYTRYLVRGFVGNSKDLELLVERYGKDVYVEMDVPNDIRYTLPMNECGGFDRCKPASHHTGSPHTCTCKDTAVAHTDCQWKDKENRTSTNMYTNVPTDSAVYMNGSHTHQSCGCKNKNNDRYQNGTHLQKSCGCKDPHVFSYHIDTGCVDLEENLGLWFALKIASENGVANIDNVEIIEAQPLTGEALARVKKREQKWKQEMAQKRFQTDKAVQAAQTAMQALFTNAQYNRLKFETLFPQIVNAKMLVQQIPYMYHPFLSGALPTVPGMNFEIIQRLLAVTGNARGLYEQRNLVRNGTFSSGTGSWHVSEGVKVQPLQNTSVLVLSEWNQEASQQLHIDPDRGYVLRVIARKEGGGKGTVTMSDCAAYTETLTFTSCDFNTSGSQTMTSGTLSGFVTKTLEIFPDTDRIRIDMGETKGTFQIESVELICMEQMEDDLYDMAGNLEEEMLDLGIENINAVTNEMCFSWDIQCP

SEQ ID NO: 13 - protein, 1260 aa, Bacillus sp.
MGGLLMNQNYNNNNNNNNEYEIMDNGVQCCTPRYPLAQAPGSELQSMNYQDVMETSIGREYQAVQQVNVGEAVSAALGILTTILKAVNPILGTAAGVISSIFGFLWKRFGTDPQAQWKQFMEAVEYLVSQKITDAVRSKAVSELEGVQRAVELYQEAANAWNMNPDDAAAKERIRRQYTSTNTVIEFAMPSFRVGGFEVPLLTVYAQAANLHLLLLRDAVKFGAGWGFSPTEVEDNYTRLQARTAEYTNHCTNTYDKGLKQAYDLAPNPTDYNKYPYLNPYSKDPIYGKYYTAPVDWNLFNDFRRDMTLMVLDIVAVWPTYNPRLYNNPNGVQIQLSREVYSTVYGRGWSNNSTVDAIESTLVRPPHLVTELTKLTFDERNLYEAETVPVAFRRVTNTLHNVGSSTTWEQSFSATSVGSLKAVHNVAATDIGNLALSLGAVPLGFSFYNKNDQHLTTVGYSGGWWNGIPKDEGSNQNSHHLSYVAALETQSTAGWWPYTYPVPLLGEWGFGWLHNSLTPTNTIVSDKTTQIPAVKAFKLTPYNSNTKVIKGPGSTGGDLIQLASGFLQYSFPSTDNRQYRIRIRYASTNGSTLTLKKWVGNFYTSSNHNLPSTYSSGPLTYNTFAIFDTGHIIRETSGFELWLDNIGSGTLIIDKIEFIPIEGSLEAYQAEQDVEKARKAVNALFTNDAKNALKLNVTDYAVDQAANLVECVSDEMHPKEKMILLDQVKFAKRLSQTRNLLNYGDFESDDWSGANGWKTSNHVHVAADNPIFKGRYLHMPGATSSQLSSNVYPTYAYQKVDESKLKSYTRYLVRGFVGNSKDLELLVERYGKDVHVEMDVPNDIQYALPMNECGEFDRCGHVSYQAASHHTCTCKNTAQMDTDCQCKDKVNRTAPGVYTNTVPGSAMYTNGYHSHKSCGCAENDQYVSGKHPHKSCGCKDPHVFSYHIDTGCVDQEENLGLWFALKIASENGVANIDNLEIIEAQPLTGEALARVKKREHKWKQEMAQKRLHTEKAVQAARDAIQRLFTSPKLNRLKFEMLLQQILNADALVQKISYVYHSFLIGAMPTVPGMNNAIYQKLSTAIAQARALYEQRNLVRNGTFSSGTGSWHVSDGVEVQPLQNTFVLVLSEWSDEASQYRRIDPERGYVLRVTARKEGAGKGTVTISDCADYTETLTFTSCDYNTVGSQTMTSGTLSGFVTKTLEIFPDTDRIRIDIGETEGTFKIESVELICMEHMEDHMYDMAGNVEASIPPLVPPMN

SEQ ID NO: 14 - protein, 1255 aa, Artificial Sequence
  Synthetic
MNQNYNNNNNNNNEYEIMDNGVQCCTPRYPLAQAPGSELQSMNYQDVMETSIGREYQAVQQVNVGEAVSAALGILTTILKAVNPILGTAAGVISSIFGFLWKRFGTDPQAQWKQFMEAVEYLVSQKITDAVRSKAVSELEGVQRAVELYQEAANAWNMNPDDAAAKERIRRQYTSTNTVIEFAMPSFRVGGFEVPLLTVYAQAANLHLLLLRDAVKFGAGWGFSPTEVEDNYTRLQARTAEYTNHCTNTYDKGLKQAYDLAPNPTDYNKYPYLNPYSKDPIYGKYYTAPVDWNLFNDFRRDMTLMVLDIVAVWPTYNPRLYNNPNGVQIQLSREVYSTVYGRGWSNNSTVDAIESTLVRPPHLVTELTKLTFDERNLYEAETVPVAFRRVTNTLHNVGSSTTWEQSFSATSVGSLKAVHNVAATDIGNLALSLGAVPLGFSFYNKNDQHLTTVGYSGGWWNGIPKDEGSNQNSHHLSYVAALETQSTAGWWPYTYPVPLLGEWGFGWLHNSLTPTNTIVSDKTTQIPAVKAFKLTPYNSNTKVIKGPGSTGGDLIQLASGFLQYSFPSTDNRQYRIRIRYASTNGSTLTLKKWVGNFYTSSNHNLPSTYSSGPLTYNTFAIFDTGHIIRETSGFELWLDNIGSGTLIIDKIEFIPIEGSLEAYQAEQDVEKARKAVNALFTNDAKNALKLNVTDYAVDQAANLVECVSDEMHPKEKMILLDQVKFAKRLSQTRNLLNYGDFESDDWSGANGWKTSNHVHVAADNPIFKGRYLHMPGATSSQLSSNVYPTYAYQKVDESKLKSYTRYLVRGFVGNSKDLELLVERYGKDVHVEMDVPNDIQYALPMNECGEFDRCGHVSYQAASHHTCTCKNTAQMDTDCQCKDKVNRTAPGVYTNTVPGSAMYTNGYHSHKSCGCAENDQYVSGKHPHKSCGCKDPHVFSYHIDTGCVDQEENLGLWFALKIASENGVANIDNLEIIEAQPLTGEALARVKKREHKWKQEMAQKRLHTEKAVQAARDAIQRLFTSPKLNRLKFEMLLQQILNADALVQKISYVYHSFLIGAMPTVPGMNNAIYQKLSTAIAQARALYEQRNLVRNGTFSSGTGSWHVSDGVEVQPLQNTFVLVLSEWSDEASQYRRIDPERGYVLRVTARKEGAGKGTVTISDCADYTETLTFTSCDYNTVGSQTMTSGTLSGFVTKTLEIFPDTDRIRIDIGETEGTFKIESVELICMEHMEDHMYDMAGNVEASIPPLVPPMN

SEQ ID NO: 15 - protein, 656 aa, Artificial Sequence
  synthetic
MNQNYNNNNNNNNEYEIMDNGVQCCTPRYPLAQAPGSELQSMNYQDVMETSIGREYQAVQQVNVGEAVSAALGILTTILKAVNPILGTAAGVISSIFGFLWKRFGTDPQAQWKQFMEAVEYLVSQKITDAVRSKAVSELEGVQRAVELYQEAANAWNMNPDDAAAKERIRRQYTSTNTVIEFAMPSFRVGGFEVPLLTVYAQAANLHLLLLRDAVKFGAGWGFSPTEVEDNYTRLQARTAEYTNHCTNTYDKGLKQAYDLAPNPTDYNKYPYLNPYSKDPIYGKYYTAPVDWNLFNDFRRDMTLMVLDIVAVWPTYNPRLYNNPNGVQIQLSREVYSTVYGRGWSNNSTVDAIESTLVRPPHLVTELTKLTFDERNLYEAETVPVAFRRVTNTLHNVGSSTTWEQSFSATSVGSLKAVHNVAATDIGNLALSLGAVPLGFSFYNKNDQHLTTVGYSGGWWNGIPKDEGSNQNSHHLSYVAALETQSTAGWWPYTYPVPLLGEWGFGWLHNSLTPTNTIVSDKTTQIPAVKAFKLTPYNSNTKVIKGPGSTGGDLIQLASGFLQYSFPSTDNRQYRIRIRYASTNGSTLTLKKWVGNFYTSSNHNLPSTYSSGPLTYNTFAIFDTGHIIRETSGFELWLDNIGSGTLIIDKIEFIPI

SEQ ID NO: 16 - protein, 589 aa, Bacillus sp.
MKYKERTQAKRKYKQALLVTVTTITLGVSTLGSTATAFAAEEDNISVISSHTLNDVGTQMSPEEKEKTFWQKASTELNVKNGKKFAGTSMKEFLNFAKTGGSASANNALRAMVLAGFDFVPYGMFISPIVGYIWPEQGGIKEQLEKLKDEIKEDTKKKIADQHLTDLNTEFSNLAENITHLENSVNGKNHSTYYSAGSIEETRRIWAAQIEFHFGKILKLAKEEAHKIDDLPLYTQVAAAHIIFLKNLEKNGIGPKYQFDSQSLKDFYGTAHIQKTIAEYEKYIAETYKQANSENMEKIEKLNVFNSEVITHNFYDPNTSATIKQKLNELKTKYQDKVKDINKELVFPGGWAAHNRALNEAENALNNVINALAAANFLSNLIDTTFHDPAFNMAASLGTWIEEKDGKTGKEIKQHYYYKNRSGNLVTEWLNIGRSMYYFSPEENFENSSGEKFKRGELVIGWINTQDEDNTIRTYFLSRQDGDQNSDGEIFNRGQMVTGMADITYENGDKESHYFSPEDGLKNSDGEIFDRGQMMTKWVEIKNTKTVEKHWYYFNPDDGSMIVKKKAVQIGGKKYDFDSNGVCTTPNGY

SEQ ID NO: 17 - protein, 551 aa, Artificial Sequence
  Synthetic
MAEEDNISVISSHTLNDVGTQMSPEEKEKTFWQKASTELNVKNGKKFAGTSMKEFLNFAKTGGSASANNALRAMVLAGFDFVPYGMFISPIVGYIWPEQGGIKEQLEKLKDEIKEDTKKKIADQHLTDLNTEFSNLAENITHLENSVNGKNHSTYYSAGSIEETRRIWAAQIEFHFGKILKLAKEEAHKIDDLPLYTQVAAAHIIFLKNLEKNGIGPKYQFDSQSLKDFYGTAHIQKTIAEYEKYIAETYKQANSENMEKIEKLNVFNSEVITHNFYDPNTSATIKQKLNELKTKYQDKVKDINKELVFPGGWAAHNRALNEAENALNNVINALAAANFLSNLIDTTFHDPAFNMAASLGTWIEEKDGKTGKEIKQHYYYKNRSGNLVTEWLNIGRSMYYFSPEENFENSSGEKFKRGELVIGWINTQDEDNTIRTYFLSRQDGDQNSDGEIFNRGQMVTGMADITYENGDKESHYFSPEDGLKNSDGEIFDRGQMMTKWVEIKNTKTVEKHWYYFNPDDGSMIVKKKAVQIGGKKYDFDSNGVCTTPNGY

SEQ ID NO: 18 - protein, 808 aa, Unknown
  Unknown organism from environmental sample
MTKKHKKILSMTLATGVFAGTYIPTAYTAFAETEPKEDLNEKQTKNINQNNPSIDLKGWFENPYKGVTFDQFINAFNNNAWNPLLVDLKNNGNAGSGTLVFLKGMMGTGLSLLPPPASLLGSVWNIFMPSTNGGTDMWKQLETYIEEKIDSKINDYHKYLMGAEFNGAMQYIKEYQRVLQIYNDSKNSLKRVEAPGTAVITAARNADTALKAFIAIIQTPEKETDSVYQQITAPIFVQAANAHLLLQRDMILYGKEWGMDTNQWQGYKDNQKKLIQEYTNYAMKVYNDGLEKKKKEAENINTQQPNRNTDRWNHINNYVREYTLSVLDFVDLFPATNPETYSKGLMQENSRRIYSSIKGAVIPQGGTGEGTTWENIQKILDSQAYTGDLHKLDIRSYDRIDAIQPWYSDKLYGGSNWTTPGWTGNTTGGTLKTLINPSDNPITRVKAQSSRTPNYIDFKFDTGGDNPSYGRYISGSVSHKEDIFEYPHQKLSQVHAFNKSTYPGFEGIDAVVFGFVDKNLNESSTYLMTNMITAIPAAKYNRGMGNFQPQVESIHAKQKAMKTDTTNSYLAYGVEVSKEQEYKIRYKVAANDNSKISLSHRKPGGNYAKIADTNIPITGNFADAVKGEYGSYKIVEGPTVKLTKGTHDLKLENSQGKFSIDQIELEPVEQDQVIAQDNFDDKRLSWVNFGGIVNGGVTGKAGMIDTNGNTWTYIQDQVLPFSKYTLSIKVKLNSTNGNERQNVTIYTDNMKRERITKTVELKGNAGYQEIQLEFITRRGLANTHVGILTSNGTSNILFDDVKVIGAKK

SEQ ID NO: 19 - protein, 639 aa, Artificial Sequence
  synthetic
METEPKEDLNEKQTKNINQNNPSIDLKGWFENPYKGVTFDQFINAFNNNAWNPLLVDLKNNGNAGSGTLVFLKGMMGTGLSLLPPPASLLGSVWNIFMPSTNGGTDMWKQLETYIEEKIDSKINDYHKYLMGAEFNGAMQYIKEYQRVLQIYNDSKNSLKRVEAPGTAVITAARNADTALKAFIAIIQTPEKETDSVYQQITAPIFVQAANAHLLLQRDMILYGKEWGMDTNQWQGYKDNQKKLIQEYTNYAMKVYNDGLEKKKKEAENINTQQPNRNTDRWNHINNYVREYTLSVLDFVDLFPATNPETYSKGLMQENSRRIYSSIKGAVIPQGGTGEGTTWENIQKILDSQAYTGDLHKLDIRSYDRIDAIQPWYSDKLYGGSNWTTPGWTGNTTGGTLKTLINPSDNPITRVKAQSSRTPNYIDFKFDTGGDNPSYGRYISGSVSHKEDIFEYPHQKLSQVHAFNKSTYPGFEGIDAVVFGFVDKNLNESSTYLMTNMITAIPAAKYNRGMGNFQPQVESIHAKQKAMKTDTTNSYLAYGVEVSKEQEYKIRYKVAANDNSKISLSHRKPGGNYAKIADTNIPITGNFADAVKGEYGSYKIVEGPTVKLTKGTHDLKLENSQGKFSIDQIELEPVE

SEQ ID NO: 20 - protein, 972 aa, Bacillus sp.
MILNNVYKCLAVTALLTQTMVLPASSFAEQFQEKNAEKEHLFQEQVRTDVSTGLIGQYFTDNQFQQLSFIQVGEKNILINKDKVKEDITNVESIRWIGNIKPAETGEYKISTSENESVIIQIDGDIIVKQNEETKPIQLEKDKIYEIKIEQRVEKGNAKELNLFWSKDHGKETLIPEEEIISPDFAQKMQVTQDEQLLLPNQNLFEANRQKRETSRKRVDTDKDGIPDFLEEKGYTFKDNAIVAWKDVYAERGYKKYISNPRKARTVADPYTDFEKVTGRMPAATKYDARDPLVAASPSIGVGVEKFHFSKNETVQEGASGTKSKTVTNSNTTTNSVDIGAKFGFNKDGFSFDFSPKYTRSWSSSTAIANAESESWSKQININLSERAFLNANIRYYNGGTASIYDLRPTSNFVLQHSGESIATVTANGNTIGNSLGPGATYPEKGKAPISLTQANEAGTVKISVNAENLDKIQDGREILNIETTQYRGQYGKITEDGRLVSGGEWGPIRTNIDAVSGVLTLNIGSSKESLERRIAAKDPRDPEDKTPEITVKEAIKKAFDVTEKDGRMIYTDEDGNDIVLEESAVNIITNENTKKEIEKQLANMQNKKIYDVKWKRGMEMTLYIPETYYDFENGKYHFSDIYTVNGGYTGNTHAMLEGNSSSGYAVIKKNLKPYTSYTARAYVKADKWTSTETTLFVGELDAVGDGGRGAKIQGKVDGDGWQLVEFSFNTGANPEYFGNIGLKNHGNTRLYFDDVSLTEWKRTENIEKSHAFKEWDTMYDDNAGKYKLQSVKFSKFPNQKINYQILYNDDTWGPILPDSSVVDNSGERTISFGTRSNAPGAENKIEVFAVDEKNPNLKVKVAEFGMVTEQQIKKAHTLDSWILSEKGTYVDGLYFENMDRNVLSHITGYKVSINDGLQSVKRRYGLDDKNKLKINILEYNLGKGIAKNVKLKIWAVVQNKDILVYEGLSGR

SEQ ID NO: 21 - protein, 970 aa, Artificial Sequence
  synthetic
MNNVYKCLAVTALLTQTMVLPASSFAEQFQEKNAEKEHLFQEQVRTDVSTGLIGQYFTDNQFQQLSFIQVGEKNILINKDKVKEDITNVESIRWIGNIKPAETGEYKISTSENESVIIQIDGDIIVKQNEETKPIQLEKDKIYEIKIEQRVEKGNAKELNLFWSKDHGKETLIPEEEIISPDFAQKMQVTQDEQLLLPNQNLFEANRQKRETSRKRVDTDKDGIPDFLEEKGYTFKDNAIVAWKDVYAERGYKKYISNPRKARTVADPYTDFEKVTGRMPAATKYDARDPLVAASPSIGVGVEKFHFSKNETVQEGASGTKSKTVTNSNTTTNSVDIGAKFGFNKDGFSFDFSPKYTRSWSSSTAIANAESESWSKQININLSERAFLNANIRYYNGGTASIYDLRPTSNFVLQHSGESIATVTANGNTIGNSLGPGATYPEKGKAPISLTQANEAGTVKISVNAENLDKIQDGREILNIETTQYRGQYGKITEDGRLVSGGEWGPIRTNIDAVSGVLTLNIGSSKESLERRIAAKDPRDPEDKTPEITVKEAIKKAFDVTEKDGRMIYTDEDGNDIVLEESAVNIITNENTKKEIEKQLANMQNKKIYDVKWKRGMEMTLYIPETYYDFENGKYHFSDIYTVNGGYTGNTHAMLEGNSSSGYAVIKKNLKPYTSYTARAYVKADKWTSTETTLFVGELDAVGDGGRGAKIQGKVDGDGWQLVEFSFNTGANPEYFGNIGLKNHGNTRLYFDDVSLTEWKRTENIEKSHAFKEWDTMYDDNAGKYKLQSVKFSKFPNQKINYQILYNDDTWGPILPDSSVVDNSGERTISFGTRSNAPGAENKIEVFAVDEKNPNLKVKVAEFGMVTEQQIKKAHTLDSWILSEKGTYVDGLYFENMDRNVLSHITGYKVSINDGLQSVKRRYGLDDKNKLKINILEYNLGKGIAKNVKLKIWAVVQNKDILVYEGLSGR

SEQ ID NO: 22 - protein, 296 aa, Unknown
  Unknown organism from environmental sample
MAIFDLDAYLLALVKKVHPFGQFYISVDTSHLSVKNAESYGFEIKNSKPQGTMFIGESELTNKTNETQTINSDSFTKTITDSVTLSVTHGVSAGVNISVGGKIFGMGVETSMSFEVSTSTTREQTSTEGVAYTVPSQGVVVPAQKTYYVYSALQRSQLEGSIRLRADLSGIFLGTMRFGDSEGLIQIGDIYEYIKTHQLSHPLPSGISLNHNDKSIHFEGVAELIYGTGTKFNVTITDKPSSQGTQEHMPIDAKTGLGTYEIHLDGKKVGIDLNDLKDQMEPEIFEKLKELQNEIV

SEQ ID NO: 23 - protein, 335 aa, Bacillus sp.
MKHFKKGMIVTVTVCSLGLTGLGGTAAFAAENEQVKEHSPIISNFSGGKCMDFNQFTEWVLKGDNHLAPAEYTEIQDLRETGTEYKSLDKFILKNDTDVARELPVPKKTFSRTDSLTLTKSKDFKFGQEIGYAYGNDASMHKITGKLSFEQHIGSSDSTLKSETETVEYGGGSHKLEPGQEIQVEYLYEQKSYAGKAVNSKEIKGDIGKKMSAIVFYYGPGHNHIDATADMHRGGQYPDNDPLRLSTAYDILKPRTKNSEKQTCLYMVFPHQDDSYYISVNDLENKLLFNDKEKKVYLKEDTATFKGLTGVKVTQTITDVKSGKVLSENPVHYLK

SEQ ID NO: 24 - protein, 307 aa, Artificial Sequence
  synthetic
MAENEQVKEHSPIISNFSGGKCMDFNQFTEWVLKGDNHLAPAEYTEIQDLRETGTEYKSLDKFILKNDTDVARELPVPKKTFSRTDSLTLTKSKDFKFGQEIGYAYGNDASMHKITGKLSFEQHIGSSDSTLKSETETVEYGGGSHKLEPGQEIQVEYLYEQKSYAGKAVNSKEIKGDIGKKMSAIVFYYGPGHNHIDATADMHRGGQYPDNDPLRLSTAYDILKPRTKNSEKQTCLYMVFPHQDDSYYISVNDLENKLLFNDKEKKVYLKEDTATFKGLTGVKVTQTITDVKSGKVLSENPVHYLK

SEQ ID NO: 25 - protein, 117 aa, Paenibacillus sp.
LFMAQREVHISVINVTDSELVLESKTNLAHGEWVVSPTNVPNNAKPATFEADSDGFATGVEGTLYYKLPQGEITLYFDDPYVGSDGFSAQSSSPAYNIQVIGGSGNVCNVTYLISNT

SEQ ID NO: 26 - protein, 115 aa, Artificial Sequence
  synthetic
MAQREVHISVINVTDSELVLESKTNLAHGEWVVSPTNVPNNAKPATFEADSDGFATGVEGTLYYKLPQGEITLYFDDPYVGSDGFSAQSSSPAYNIQVIGGSGNVCNVTYLISNT

SEQ ID NO: 27 - protein, 860 aa, Unknown
  Unknown organism from environmental sample
MKNKKKYMKPLAVGLLATNIIGFGTQTVAFAATDKAPAKEQAQKNSLKPMVLASMPSDTSELQKILEDALTNPDTQISPKLVKDLQDKGFDYLSIVKAVTGGLVKKIPYAGSFLSPLVGFVFPGKKYLTKETVWGAIQDKVSNLIDEKLTENQVNELIAKLTGVHDSLTKYQVAVGLVNGKQPPIDKFMQKSAETDRDKGNLRRNINELDTLLGQKVPEFAVKNYEAASIPYYVQIANIHLFLLRDAVTHADEWGLTAKEKNTYLSRLQSKIIEYSNTVYDSFNKGVSAAKNKDGNWDNVNKFVRTMTVYGLDFVALWPTFDPIRYDEPTKLQQTRQVYSDLMGRPQAGSNYDTTLSKVYYSGFGGYPGELKQFNVSQGDRIDSIKEVFDWTGDGSQDYTQQWGNPNPSGYSVRNVTRDAPVIGLSAYESWNRNWYNMFSLAYPGKNVEFESRFRKALKDGYVADTSAPSGQKVSSIKVVETRKDLNSISSMVAAYIPEEVHPENILAARSITGIPAEKYTARSSVDNVIEYMNGSNAMVFTKNGSSITYNIQSPGKRKYKIRLRVATNSDTSVGISVNGNAQQMNIQNTEATATDRTGIKGVNGTYMVIEGPTVELQEGKNTITIDHKDANKLVLDRIEFEHQPAAPEHGNPGWQTIDGKKYLYGKEGKLEMNSFQMMDGKKVYLDDDGAMVTGWKPIDGDKYYFNKTGDGSGMEREGEIAIGWQTIDGVKYYFNRTGDGSGMEREGKLATGSIKIDGSRYYFNKIGDGTGYNHEGEMENGWQTIDGFKYYLDPQNGKMAIGWQTIDGVKYYFNRTGDGSGMEHEGQMALGNMTIDGVKHYFNKTGDGTGYNHEGELEW

SEQ ID NO: 28 - protein, 614 aa, Artificial Sequence
  synthetic
MATDKAPAKEQAQKNSLKPMVLASMPSDTSELQKILEDALTNPDTQISPKLVKDLQDKGFDYLSIVKAVTGGLVKKIPYAGSFLSPLVGFVFPGKKYLTKETVWGAIQDKVSNLIDEKLTENQVNELIAKLTGVHDSLTKYQVAVGLVNGKQPPIDKFMQKSAETDRDKGNLRRNINELDTLLGQKVPEFAVKNYEAASIPYYVQIANIHLFLLRDAVTHADEWGLTAKEKNTYLSRLQSKIIEYSNTVYDSFNKGVSAAKNKDGNWDNVNKFVRTMTVYGLDFVALWPTFDPIRYDEPTKLQQTRQVYSDLMGRPQAGSNYDTTLSKVYYSGFGGYPGELKQFNVSQGDRIDSIKEVFDWTGDGSQDYTQQWGNPNPSGYSVRNVTRDAPVIGLSAYESWNRNWYNMFSLAYPGKNVEFESRFRKALKDGYVADTSAPSGQKVSSIKVVETRKDLNSISSMVAAYIPEEVHPENILAARSITGIPAEKYTARSSVDNVIEYMNGSNAMVFTKNGSSITYNIQSPGKRKYKIRLRVATNSDTSVGISVNGNAQQMNIQNTEATATDRTGIKGVNGTYMVIEGPTVELQEGKNTITIDHKDANKLVLDRIEFEHQ

SEQ ID NO: 29 - protein, 329 aa, Bacillus sp.
MNKNRLKKPMVALMLATSIGIPCVSVPGSVLAAENTPTNVNENVRVGITDIQSELKKIGEYYYANEISGTQIKEGLNTLTFESKPRSVETKVNFDITGTVNDLKFDTTVVKYVGDNIFDNTEIDIPQDYTTGKFTESITESITTTTTNGFKVGGSGDGSNIFTIPLLLNNGMKINAEFNSSTTNSKTKSETKTIEASPQKITVPAHKKYKVDVLLEHRNFWGDVTFTGSAQDPITTIVAKAGKVNMGGSIIKEYTFKDLAGSYYNKLTNSQKNNIEGLEFINLFPGPSNVLKAKGTAKVEGIFGSVLTVKTYDITDKSNPKLVETKSFN

SEQ ID NO: 30 - protein, 298 aa, Artificial Sequence
  synthetic
MAENTPTNVNENVRVGITDIQSELKKIGEYYYANEISGTQIKEGLNTLTFESKPRSVETKVNFDITGTVNDLKFDTTVVKYVGDNIFDNTEIDIPQDYTTGKFTESITESITTTTTNGFKVGGSGDGSNIFTIPLLLNNGMKINAEFNSSTTNSKTKSETKTIEASPQKITVPAHKKYKVDVLLEHRNFWGDVTFTGSAQDPITTIVAKAGKVNMGGSIIKEYTFKDLAGSYYNKLTNSQKNNIEGLEFINLFPGPSNVLKAKGTAKVEGIFGSVLTVKTYDITDKSNPKLVETKSFN

SEQ ID NO: 31 - protein, 502 aa, Pseudomonas sp.
LHFKYLTIWNQWIFLKISEIKMTKKNQTKSQHAFSSPASNTIDNIRASLERKELLQEAVASAALQSNAGLIDSNGDSLIQRQVTPSGLPGKFYDILRDSILAGANLIPVVGGFLSYLGALFIPNSGESPDQMWRRLIDARISDALLRKVQRDLIGLSEVTKLYKTAVETGNNKTILAQSISANTVFTAMLPGFQIAGEETALLPLFTIAATLHLALLRDMVLKGKEIGLEDAHVARLAGDTASLITRYSKHVDNYVSVAIDKARRDNPYNDIGLRRRMPLSAMLETKAYYQLTVIDLRDTWSGFDPIRFPSRSLITLKREVYTPVLGWWDANSRTPDVIPLWVRPQSPLNFIRVWEQRYSRADYIFGLELNYVDGTKFSRGSTTTGKVSKIPIPTGRYIKEVVTQTTAGVFHMGLRYDDGSELLVGEASDEVYVSSFKNSFSGHKLSSIRVLGQGRNAAKGAVSGYVLGFQLINQSATQISLAAFDAIAPKIAPQLLEWIAK

SEQ ID NO: 32 - protein, 481 aa, Artificial Sequence
  synthetic
MTKKNQTKSQHAFSSPASNTIDNIRASLERKELLQEAVASAALQSNAGLIDSNGDSLIQRQVTPSGLPGKFYDILRDSILAGANLIPVVGGFLSYLGALFIPNSGESPDQMWRRLIDARISDALLRKVQRDLIGLSEVTKLYKTAVETGNNKTILAQSISANTVFTAMLPGFQIAGEETALLPLFTIAATLHLALLRDMVLKGKEIGLEDAHVARLAGDTASLITRYSKHVDNYVSVAIDKARRDNPYNDIGLRRRMPLSAMLETKAYYQLTVIDLRDTWSGFDPIRFPSRSLITLKREVYTPVLGWWDANSRTPDVIPLWVRPQSPLNFIRVWEQRYSRADYIFGLELNYVDGTKFSRGSTTTGKVSKIPIPTGRYIKEVVTQTTAGVFHMGLRYDDGSELLVGEASDEVYVSSFKNSFSGHKLSSIRVLGQGRNAAKGAVSGYVLGFQLINQSATQISLAAFDAIAPKIAPQLLEWIAK

SEQ ID NO: 33 - protein, 858 aa, Unknown
  Unknown organism from environmental sample
MKNKKKYMKPLAIGLLATNIIGFGTQTVAFAATDKVGSKEQMQKQMKTQNKSFNPTVLASMPSDTSELQKMLEDAIKNKDNQITPELIKNLQDKGFDYLSIVKALTGGLMKQIPYAGSILSPLVVGLFPGKGYVTKENVWGEIQDRVSNLIDQKLEQYQIDQLIAKLKGIHDNLGEYQNRVARVNGVQPPVANFIQKNESSDQNKENLRQTIHTLDLALGRVIPEFAVAGYEAASLPYYVQIANVHLFLLKDAVTHADEWGLTKSEKDDYLKRLQQKIQEYSSVVYDSFNKGVEAAKSKGGSTADSWNRVNGYVRTMTMYGLDFVALWPAFDTKYYGQPIKLQQTRELYSNMIGRPINWQDYDTTLQQIHNSGYAGYPGELKQISVSQWDRIDAIREIFDWTGDGSRDYTLQWGTANKNGYSDRSPTVNNPAIGISAYETNDANRYNMSTITYKQNNEVSWFYGPFTTQGDSKDGSRIDSKAPAGHKLSRVKVQEKRSDLNTISSFVAAYIPEEVHPQNILEAKAITGVPAEKYLAHAGFENKIEYMNGSNAMVSSKNGDTIDYNVQSPGKQKYKIRIRVATNSDTSVGISINGNSQQVNIKNTEAKSKIEDGMKVKGVNGNYMLIEGPTVELNEGVNTVQLKNSGGAKIALDRIEFEPIGGELRQWKQEGDKWYCYENDKKLTGWQEINGVRYYLGKTGDGSGMNTEGEMATGWKTIYGVQYYFGKAGDDSGMGQEGQQAIGWTKINGVQYYFAHNGDGSGMRNEGELVTGWKKIYGKTYYFGKTGDGSGLNHEAELATGWRTINGVKYYFNKTGDGSGMKHEGEMAIGAMTIDGVKHYFNKTGDGTGYNHEGELEW

SEQ ID NO: 34 - protein, 630 aa, Artificial Sequence
  synthetic
MATDKVGSKEQMQKQMKTQNKSFNPTVLASMPSDTSELQKMLEDAIKNKDNQITPELIKNLQDKGFDYLSIVKALTGGLMKQIPYAGSILSPLVVGLFPGKGYVTKENVWGEIQDRVSNLIDQKLEQYQIDQLIAKLKGIHDNLGEYQNRVARVNGVQPPVANFIQKNESSDQNKENLRQTIHTLDLALGRVIPEFAVAGYEAASLPYYVQIANVHLFLLKDAVTHADEWGLTKSEKDDYLKRLQQKIQEYSSVVYDSFNKGVEAAKSKGGSTADSWNRVNGYVRTMTMYGLDFVALWPAFDTKYYGQPIKLQQTRELYSNMIGRPINWQDYDTTLQQIHNSGYAGYPGELKQISVSQWDRIDAIREIFDWTGDGSRDYTLQWGTANKNGYSDRSPTVNNPAIGISAYETNDANRYNMSTITYKQNNEVSWFYGPFTTQGDSKDGSRIDSKAPAGHKLSRVKVQEKRSDLNTISSFVAAYIPEEVHPQNILEAKAITGVPAEKYLAHAGFENKIEYMNGSNAMVSSKNGDTIDYNVQSPGKQKYKIRIRVATNSDTSVGISINGNSQQVNIKNTEAKSKIEDGMKVKGVNGNYMLIEGPTVELNEGVNTVQLKNSGGAKIALDRIEFEPI

SEQ ID NO: 35 - protein, 551 aa, Bacillus sp.
MEHTNKNINKAQQVSSDSLGASGGTNSQDFEKLMDGLIKSVNSEGFNLKNKKELILLGGDTLKSAYKDAHENSGNFNNTARTIAMGATALIPYGGAFISPLLGLLWPENVPNSENLIEKMKNELVKMMDEKIQDFDLDILRTDTKHLKKQLVEFENIINGKKTESFYTGSIEETRRADVLQMNSDFDKLLNRSRKENRLIAELPIFTIVAVAYLEFLHFMEKNAKSTLLKFDSTTINEKFITPLPIRRTEYLNHVKKTYEEGNKEFEKKMKIIAIKVLGKNNPKPQDNLDRMTDVIADLRKQKKAFEHSISLRDFDKEIKEATDFMNEYAGLLHQKNQFYNNTWGNEAFRLMVKVGGWVKENGKWYCFDENGNMLTELNQFGDKWYYFSPEKTNQFEKGEMVTGWLDYKGYRYYFSPEKTNQYEEGQMVTGFVHIKSATYVFDLKGHMVTGWYNKQYFSPEKTNKFEKGQMVTGWLSFSADSAMSMILVIGLRNHISPDAIIKKNEELKKQPAGTKIWVYFSPGGQSISNTKQTIDGKMYEFDKFGICLNP

SEQ ID NO: 36 - protein, 1270 aa, Unknown
  Unknown organism from environmental sample
MIGGQFMNQYYRNNEMEVLDLEVGRPRYPYAQNPGTELQSMDYKEWLLMCERNDSLRPGTLASTKDIITTSIDIVGTILGLIPIVGGPISAGVSILNSIIKLLWPEPTPEEPDPNKIWIQFKDKVEQLINQAINQEVWNAAIGKLNGLKRSLDLYQSAFSTWTKDQTDPELQEDLRMNFTSARHEMVTTIEQFRYTGQEVNLLTVFAQAADLHLLLLREGIMYGEQWGFDERTVQDFYSNAYGEGLRDLLPEYTDYCNKWYNQGLTIAYNLTPDLSNTERYPWAANRAPGNIEVLTQLEGWNLFNDWRRDVTIMALDLVAIWPTYDIKIYDNSAYGVQTELTRPVYSQATGTCWGSVLSRDQYEQGIVRPPHLATWLNFIQFHLNPGPYDAPNSYKHYRGIQMEYYLSGPDYTTYMSPLIGSTSTSGKKILVESKYDKDVFQVDSKHNDAVYTMDFLRNNGDIQTVGYRRDPNYSTLSWPPETNVSNYGHRMTWISGPVSSSTIPAFSMEWVHNSSSPFNNFATSTAENPIITQISAVKADALAGDAYVTKGNGTTGGDLITLPANSKFTIRLTGTSYTPYQVRLRYTCPSGGDLLLSRYYNINGTWYNDAYFSMVLPATPSSGELTYNSFGYVMAPNNLGPTPSTDWEMQFANVGVSPITIDKIEFIPILGNAAEYEAKQNLKKARKAVSVLFTDDTKNALRLDATDYDVDQAANQVDCISDDMFPKEKMVLLDRVKQAKRLSQERNLLHYGDFKSSNWSSENGWTVSNNVSIQADPLVSRGCYLNMPGARVIDFSNTLYPTYAYQKIDESKLKPYTRYWIRGFVESSKELELLATRYGKDIHTKMNVPSLPGIRMPDYCGANQVSLPISIDRCENIYATSAYTINESISNNRLCGDKHHFVFHIDVGELDMRANPGIQFGLKISSPEGMAQLDNLEVIEGYPLAGEALSRVKKREQKWKRERELQCMETEKAVTSATQAVDSLFTDTKKDRLKKTTNMQNIENAAAKVNMIPYVHNLEFEDLPGMNSLIFQQLQSYIMNALNLYGRRNVIRNGDFSGGLSNWLVTDGVDVVERDGKSSVLVISQWDASVSQDVCVQPEHGYVLRVTARKEGAGKGYVTISDCTTENTETVTFTSDEMVMTNRPPVTSQTSSICDITDNYGTGSSPYNNNTVENSYAESLDTIPCSCGRYGREVCSCGSNYMRNSSSERNIEPSYTSTQRIPNRNASLSSAYVTKTIEMFPETNHVRIEIGETQGTFLIESIELICMED

SEQ ID NO: 37 - protein, 664 aa, Artificial Sequence
  synthetic
MNQYYRNNEMEVLDLEVGRPRYPYAQNPGTELQSMDYKEWLLMCERNDSLRPGTLASTKDIITTSIDIVGTILGLIPIVGGPISAGVSILNSIIKLLWPEPTPEEPDPNKIWIQFKDKVEQLINQAINQEVWNAAIGKLNGLKRSLDLYQSAFSTWTKDQTDPELQEDLRMNFTSARHEMVTTIEQFRYTGQEVNLLTVFAQAADLHLLLLREGIMYGEQWGFDERTVQDFYSNAYGEGLRDLLPEYTDYCNKWYNQGLTIAYNLTPDLSNTERYPWAANRAPGNIEVLTQLEGWNLFNDWRRDVTIMALDLVAIWPTYDIKIYDNSAYGVQTELTRPVYSQATGTCWGSVLSRDQYEQGIVRPPHLATWLNFIQFHLNPGPYDAPNSYKHYRGIQMEYYLSGPDYTTYMSPLIGSTSTSGKKILVESKYDKDVFQVDSKHNDAVYTMDFLRNNGDIQTVGYRRDPNYSTLSWPPETNVSNYGHRMTWISGPVSSSTIPAFSMEWVHNSSSPFNNFATSTAENPIITQISAVKADALAGDAYVTKGNGTTGGDLITLPANSKFTIRLTGTSYTPYQVRLRYTCPSGGDLLLSRYYNINGTWYNDAYFSMVLPATPSSGELTYNSFGYVMAPNNLGPTPSTDWEMQFANVGVSPITIDKIEFIPI

SEQ ID NO: 38 - protein, 427 aa, Bacillus sp.
LLILLFRNKSISNVQYNFIFCNLVGILPTKLGGNIMKSISKKVMAGLGVGAMSLSIWAPSSQAAAPANNEYHTIHLAANSNIVWDVYKGWDSDNAGIILYNGDRGDNEQFVFFPLDGGAYAIVNKSTGKPVGLGNAYIWSDGVRDAMSFNDQGLRQTSWTGASSEQWYLRDKGNNNYEIVNQGNGKVASWAWNQIRGAHSRDYVDLDESNPSDNDRLFNIPAARSTFSLPTLPTVGTRPNAPEYNTSGAIDQQLPQTSNSVVVGASLIPSIMVKDNGASDYTKIHNSPYYVLVKEEYWEKVRSEIIPAGATSKYTVKSGVSEIDQKKMSDTLAMSFGSDLGLKFGESSLSIKSSVSRTIQTEVTKTSTNATEETEEKSIPSIPGQNTGFTAYQLVTKYTLKRTDGSVVTDPSIVRDSKQTIARTIAK

SEQ ID NO: 39 - protein, 392 aa, Artificial Sequence
  synthetic
MKSISKKVMAGLGVGAMSLSIWAPSSQAAAPANNEYHTIHLAANSNIVWDVYKGWDSDNAGIILYNGDRGDNEQFVFFPLDGGAYAIVNKSTGKPVGLGNAYIWSDGVRDAMSFNDQGLRQTSWTGASSEQWYLRDKGNNNYEIVNQGNGKVASWAWNQIRGAHSRDYVDLDESNPSDNDRLFNIPAARSTFSLPTLPTVGTRPNAPEYNTSGAIDQQLPQTSNSVVVGASLIPSIMVKDNGASDYTKIHNSPYYVLVKEEYWEKVRSEIIPAGATSKYTVKSGVSEIDQKKMSDTLAMSFGSDLGLKFGESSLSIKSSVSRTIQTEVTKTSTNATEETEEKSIPSIPGQNTGFTAYQLVTKYTLKRTDGSVVTDPSIVRDSKQTIARTIAK

SEQ ID NO: 40 - protein, 414 aa, Unknown
  Unknown organism from environmental sample
MGIQKVLRSAAPVVAIAVAGVPLSTAPAFAEQPARHCIFNITDGSERCFADFRQSIAYATAGRVSDAPDSPAAAATSKSFADEVNRAGAAAEKSGAGGAAVPGPVDASAKAAASGQILVMMLYTGQNHDGDSAGWVADGPCTANSAQRPTWSWHDLSRFAKGSGGTWGDVANSYVGYNQCDIKPFSGVNWTGYQGDAAPQGYTGSGQLHNHIESVQLFYRPSDLEALGQCSGGNANCTYVPASDTYGSLDQTKVATAANCSSLQQSETLAWSHQFTTTDTVGATVGVTVGFDVLEKFEVSVQASYSHSWAQTASFTQTTPINVPAGEIGTLWIAPITETVTGNFTEELGYQYYGSSHFWPSFSSTRVVEEQAPAVVWKSRAMTADERQSICGSAAPAAAGLTVHMEPTATQVRS

SEQ ID NO: 41 - protein, 295 aa, Artificial Sequence
  synthetic
MMLYTGQNHDGDSAGWVADGPCTANSAQRPTWSWHDLSRFAKGSGGTWGDVANSYVGYNQCDIKPFSGVNWTGYQGDAAPQGYTGSGQLHNHIESVQLFYRPSDLEALGQCSGGNANCTYVPASDTYGSLDQTKVATAANCSSLQQSETLAWSHQFTTTDTVGATVGVTVGFDVLEKFEVSVQASYSHSWAQTASFTQTTPINVPAGEIGTLWIAPITETVTGNFTEELGYQYYGSSHFWPSFSSTRVVEEQAPAVVWKSRAMTADERQSICGSAAPAAAGLTVHMEPTATQVRS

SEQ ID NO: 42 - protein, 385 aa, Artificial Sequence
  synthetic
MEQPARHCIFNITDGSERCFADFRQSIAYATAGRVSDAPDSPAAAATSKSFADEVNRAGAAAEKSGAGGAAVPGPVDASAKAAASGQILVMMLYTGQNHDGDSAGWVADGPCTANSAQRPTWSWHDLSRFAKGSGGTWGDVANSYVGYNQCDIKPFSGVNWTGYQGDAAPQGYTGSGQLHNHIESVQLFYRPSDLEALGQCSGGNANCTYVPASDTYGSLDQTKVATAANCSSLQQSETLAWSHQFTTTDTVGATVGVTVGFDVLEKFEVSVQASYSHSWAQTASFTQTTPINVPAGEIGTLWIAPITETVTGNFTEELGYQYYGSSHFWPSFSSTRVVEEQAPAVVWKSRAMTADERQSICGSAAPAAAGLTVHMEPTATQVRS

SEQ ID NO: 43 - protein, 1287 aa, Unknown
  Unknown organism from environmental sample
MRCGDYKMTGEKSMNQYYRNDEMEILDPGMGQPRYPYARPNSELQSMHYKDWLDMCERNGNGLTTLRRGTLASAQDIITVSLDILGTILGFIPIVGGALSAGVSILNSIIGLLWPEPEEPGIPTDPNAIWIEFMEKVEQLIDQKISQEAFNAAIGRLTGLKRALNLYQVSFELWADDQTDEELKEDVRTRFTAALFEMVATIETFRYPGQEVNLLTVFAQAADLHLLLLREGIMYGLQWGFDQRTVDSFYTNSQKEGLKDLLPIYTDHCTYWYNEGLKITYNLKPDLSNTERYPWAANKPSWNIQVLEELEGWNLFNDFRRDVTIMALDLVALWPTYDLYYYDNLKYGVKTELTRPVYSQAAGTSWGSILPRDRYEQGIVRSPHLVTLLQSIDFKLNPGPFTPSNSYQHYTGLQLKYYYSGRDYTIHASPLIGTTSSSGKTINVDGKSGSVIYQSDIKHNDAVYTMEFKKTNGSSEQVGYTYNPNYSTLSWPPETDVSNYGHQMSWISGPVELNTIPAFGVEWLHESCSPFNVIADDTVENPIITQIPAVKGASISGNATVIKNPGHTGGDLVQLPANSGSQAQLFITVETPPSKIGKTYQIRVRYAASSAAALQVNQCNFSGGSCYNTASIAVPATYSNNALLYNAFQYADVFPITIQNIDFSLQFFNRSGGPIILDKIEFIPIEGSLEEYTAKQELENVRKAVNALFTNNTKNALRLEITDYDVDQAANKVACMSSARYEKEKMILLDQVKFAKRLSQARNLLNYGDFESPNWSDKNGWKVSNNVMVQSDYPISKGRYLKMPGARISEFSSKLYSTYAYQKVDESNLKPYTRYLVRGFVESSKKLDLFVTRYGKDIYTEMNIPPYQVISNQAGRILDGCGMEQVSGYTISPTMSSNPCQNVYATNEDRFMMPSLNGLCEDKQHFLFHIDVGELDTRADPGIEVGFKISSPEGMAKLDNVEVIEAQPLTGEALARVKKREQKWKREREHQCMETETAVKLAIQALDSLFTSSQKDRLKATVTMQSIVNAERKVNAIPYVSNPYLEDLPGMNTLIFQQLQSVIRNAFELYGRRNVIRNGDFSGGLSNWHATAGADVQERDGRSNVLVISQWDANVSQDVCVQPERGYVLRVTARKEGTGKGYVTISDCTEENTETVTFTSNESAPIQRPPVTPSTSSACDLSKYTDGYEIGTSYAESSDTSACSCGSHGIESCSCRGNYMRNGSSERYGAQSYTSTQRMLDRNPSPSLGYVTKIIEIFPETNRIRIEIGETQGTFLVESIELICMED

SEQ ID NO: 44 - protein, 685 aa, Artificial Sequence
  synthetic
MRCGDYKMTGEKSMNQYYRNDEMEILDPGMGQPRYPYARPNSELQSMHYKDWLDMCERNGNGLTTLRRGTLASAQDIITVSLDILGTILGFIPIVGGALSAGVSILNSIIGLLWPEPEEPGIPTDPNAIWIEFMEKVEQLIDQKISQEAFNAAIGRLTGLKRALNLYQVSFELWADDQTDEELKEDVRTRFTAALFEMVATIETFRYPGQEVNLLTVFAQAADLHLLLLREGIMYGLQWGFDQRTVDSFYTNSQKEGLKDLLPIYTDHCTYWYNEGLKITYNLKPDLSNTERYPWAANKPSWNIQVLEELEGWNLFNDFRRDVTIMALDLVALWPTYDLYYYDNLKYGVKTELTRPVYSQAAGTSWGSILPRDRYEQGIVRSPHLVTLLQSIDFKLNPGPFTPSNSYQHYTGLQLKYYYSGRDYTIHASPLIGTTSSSGKTINVDGKSGSVIYQSDIKHNDAVYTMEFKKTNGSSEQVGYTYNPNYSTLSWPPETDVSNYGHQMSWISGPVELNTIPAFGVEWLHESCSPFNVIADDTVENPIITQIPAVKGASISGNATVIKNPGHTGGDLVQLPANSGSQAQLFITVETPPSKIGKTYQIRVRYAASSAAALQVNQCNFSGGSCYNTASIAVPATYSNNALLYNAFQYADVFPITIQNIDFSLQFFNRSGGPIILDKIEFIPI

SEQ ID NO: 45 - protein, 207 aa, Streptomyces sp.
MALSGSRRPHSNLPVHDQLTDRQYRPKGDGDRPAFGLLPTRQEHPVQKIRTLAAGAIACAALVLTAAPAQARPATVPVTAAAAAPVTAAADEAARSTWVTVFNKTTKPLALAGNRLLHGCWMDNRTPQSWVNSRGAVMFASESCGFMTGTEGEVTYNINEGGQVHLTWNNPYSGANSYTCTVPSGYSCVYSGGSGNNAQVTFTFTKD

SEQ ID NO: 46 - protein, 276 aa, Bacillus sp.
MSILNIDTAVRQYISKYNYMPNTNGNYTLNLDGITIDYKAITPISYKITGQGIDIIKTDSITNTSNTISIDREFNYSQTITNRASSKTTEGITKGSQTTLTAGISMTFQGITPSSSISKQLTTQYSLNTETAIETAIAETWGEKYTLTIPPNTKATLVYTIKKGPFKIILDVDALISGRFLATGTYNRPGGLNQPSATLTEQYGAPVAYALQGLPNIQVDNPSNAQVATLKGKVELVGELGVDSALVLNSQSLSGSLPPTSTVISQKSSPNTILFG

SEQ ID NO: 47 - protein, 346 aa, Bacillus sp.
MKLKQLVIRTGIVFTMGLISVGTATTPTFADTIDANNRGVFQKDVVQDPELVTRIWAALTNDKGYANMFSFSPIRTTKFHVTSINKEPLMIDAARLDNSKGKEPIEFPAPAKTHTETNSLTVSAGVDISLGFEIAATAGVPGVSSMTTKLTGGIKVSTGFQELTSTTTSISYGGSGSMIKANPGEITGYDYMINRSKASGVMNTGQKITEIGPELEIWDIKRYYANDKVAEHAKSIPGVKKGIEVYNYFKQLQQWNINENRDIGIKHAPPGVYNPNISIIAGGQLHMFVFIDDETKSVYTIENQRSFQAVAGTDFTAVPIKINPHTGRVQTDLTKPKIQKNLEYKK

SEQ ID NO: 48 - protein, 465 aa, Pseudomonas sp.
LALRQLFDSWPSDQLESFPMHSLQFKDLLINFTTEFHLLWNDKGSGAHMSASFWRPEISANHLNNYFSLGDVAVEGYSQINNRKIVAVVSDANAVDGTALRPPERLAAVWNNQGSKGAAEISVWRPIPPAGYVAMGNVCSVGYDSPPLTAIRCVRADLVIASHLGEIIWNDKGSRANVDFSAWDIIPPEAQPGEAYLAPGTFLGVGSYARLQTPGLVHSLRVELPIQMSDMPPPPAPRPDVEQPETPAEATIHSCELPWFAVRDWELKPTEQLRLSPTYRLERSDRYQSVGVGVNEADTNQTYNWRTAKGEIGNESLTLSLSTGIELAHAWSMRTHLAKSHFSARLNSQLVHTGQSSKGWSQTAMADIAAYIPANKTVAAYVIRSEYKLLRTDGSQLATTICYVNADQVYFRESLPTDAENGDDLAALLPESEPVTPNVLPDLVPEVDAALEITPGDISDDSLFL

SEQ ID NO: 49 - protein, 446 aa, Artificial Sequence
  synthetic
MHSLQFKDLLINFTTEFHLLWNDKGSGAHMSASFWRPEISANHLNNYFSLGDVAVEGYSQINNRKIVAVVSDANAVDGTALRPPERLAAVWNNQGSKGAAEISVWRPIPPAGYVAMGNVCSVGYDSPPLTAIRCVRADLVIASHLGEIIWNDKGSRANVDFSAWDIIPPEAQPGEAYLAPGTFLGVGSYARLQTPGLVHSLRVELPIQMSDMPPPPAPRPDVEQPETPAEATIHSCELPWFAVRDWELKPTEQLRLSPTYRLERSDRYQSVGVGVNEADTNQTYNWRTAKGEIGNESLTLSLSTGIELAHAWSMRTHLAKSHFSARLNSQLVHTGQSSKGWSQTAMADIAAYIPANKTVAAYVIRSEYKLLRTDGSQLATTICYVNADQVYFRESLPTDAENGDDLAALLPESEPVTPNVLPDLVPEVDAALEITPGDISDDSLFL

SEQ ID NO: 50 - protein, 89 aa, Pedobacter sp.
MMSTTLKHTPTDYERLILSGKDFFPHPPPLPKSSWESKARTVVIALAAKAPYIGRAISYVIKSFWQEAKADIWAQVSENVARMVDLAYP

SEQ ID NO: 51 - protein, 115 aa, Paenibacillus sp.
MSQREVHIPVINVTDSELVLESKTNLAHGEWVVSPTNVTNNAKPVNFEADSDGFATGVEGTIYYKLPQGEITLYFDDPYVGSDGFSAQSSSPAYTVQVIGGSGNVCNVTYLVSNT

SEQ ID NO: 52 - protein, 326 aa, Bacillus sp.
MKRKILTAALVGMPLCIISGNTANAQINTSPGIIPEQSSLQKLSSYQTQGSQVVNIDQVVRKAIPGYARFVNGLGETSKVGVHINDVKFLDVEEKYIDPDYPIQSKLIGKGPEKLVQSIEEYIYNDHPSAELTKSHTFQHGISNTSTITNSVTHNHKAGVKFTYKAKVDLLVESAEVGGEVSYEYTNSNQNGTSDSKTFTKTFSSTASAKLPPNSKGKLVSSVYTTPATYEIKSRSFFTGSVQFSYVLANDPGTLRTTTVSLHELFSRTDEQTVDDIASNYHMWASTFWNPENGQPVNALLFEGKSILNIDETYRTETRLTDIKGI

SEQ ID NO: 53 - protein, 302 aa, Artificial Sequence
  synthetic
MQINTSPGIIPEQSSLQKLSSYQTQGSQVVNIDQVVRKAIPGYARFVNGLGETSKVGVHINDVKFLDVEEKYIDPDYPIQSKLIGKGPEKLVQSIEEYIYNDHPSAELTKSHTFQHGISNTSTITNSVTHNHKAGVKFTYKAKVDLLVESAEVGGEVSYEYTNSNQNGTSDSKTFTKTFSSTASAKLPPNSKGKLVSSVYTTPATYEIKSRSFFTGSVQFSYVLANDPGTLRTTTVSLHELFSRTDEQTVDDIASNYHMWASTFWNPENGQPVNALLFEGKSILNIDETYRTETRLTDIKGI

SEQ ID NO: 54 - protein, 321 aa, Paenibacillus sp.
LGDDLMKAKLKLLTAMMILSVSVLLPTGNISAAGAEAMNANNQIRSSNYQAVQVVNIEQSARKVIPNYVRWIHNGLHPSVRVDVLDVKLINVEEQGVVPDFKVELDLVQRGPEKLVQTLQHDAFNPSSDKELTVSHNFTHTVSNASTLTKSITHSHKAGAKATFKVKTSFFGNEAEVGGELSYEYTNSNQSGTSDAKTVTFSTNSSASAKLPPMSKGTLISHVYASPATYKIKSQSYFTGDVQFSYILSNDAPGAVRTLTVPLHDLFFRGDESNEVAFKDNLWASSVWDATGRQTKALIFEGLSFLTLDEQYRTETYLKDI

SEQ ID NO: 55 - protein, 290 aa, Artificial Sequence
  synthetic
MAGAEAMNANNQIRSSNYQAVQVVNIEQSARKVIPNYVRWIHNGLHPSVRVDVLDVKLINVEEQGVVPDFKVELDLVQRGPEKLVQTLQHDAFNPSSDKELTVSHNFTHTVSNASTLTKSITHSHKAGAKATFKVKTSFFGNEAEVGGELSYEYTNSNQSGTSDAKTVTFSTNSSASAKLPPMSKGTLISHVYASPATYKIKSQSYFTGDVQFSYILSNDAPGAVRTLTVPLHDLFFRGDESNEVAFKDNLWASSVWDATGRQTKALIFEGLSFLTLDEQYRTETYLKDI

SEQ ID NO: 56 - protein, 316 aa, Artificial Sequence
  synthetic
MKAKLKLLTAMMILSVSVLLPTGNISAAGAEAMNANNQIRSSNYQAVQVVNIEQSARKVIPNYVRWIHNGLHPSVRVDVLDVKLINVEEQGVVPDFKVELDLVQRGPEKLVQTLQHDAFNPSSDKELTVSHNFTHTVSNASTLTKSITHSHKAGAKATFKVKTSFFGNEAEVGGELSYEYTNSNQSGTSDAKTVTFSTNSSASAKLPPMSKGTLISHVYASPATYKIKSQSYFTGDVQFSYILSNDAPGAVRTLTVPLHDLFFRGDESNEVAFKDNLWASSVWDATGRQTKALIFEGLSFLTLDEQYRTETYLKDI

SEQ ID NO: 57 - protein, 397 aa, Bacillus sp.
MKSISKKVMAGLLVGATSLSIWAPISEAAAPENNRYYNIQLKSNQKKVWNVTRASNDNDRAILLWEGGSADNERFAFFQLDGGAYAIVNKNSGKIVTYGEGSWFADRYRLGGETLQQQSWNGEAKQKWNLRDLGSNNYEIVNQGNGKVPTYQWQGSLADNVEFLKMDNSNPSDADKVFTLFNGTVNFLGQNITVFNDTFSVPNLPATGNRPDAPNYTGGVDQQLPQTSNSVVVGASLIPCIMVNDNQASDYTKIHNSPYYTLVKEEYWDKTFSAVIPAGLTRNYSFKTGMTSVDQQKMTDTLSMKIGADFGLKFGNATASIKSEISRTLQTEISTTNTEASEETVTSTVISEPGKTTGYTEYQLATKYTLKRADGSIVSDPWVVKNNKITIARKNAQ

SEQ ID NO: 58 - protein, 368 aa, Artificial Sequence
  synthetic
MPENNRYYNIQLKSNQKKVWNVTRASNDNDRAILLWEGGSADNERFAFFQLDGGAYAIVNKNSGKIVTYGEGSWFADRYRLGGETLQQQSWNGEAKQKWNLRDLGSNNYEIVNQGNGKVPTYQWQGSLADNVEFLKMDNSNPSDADKVFTLFNGTVNFLGQNITVFNDTFSVPNLPATGNRPDAPNYTGGVDQQLPQTSNSVVVGASLIPCIMVNDNQASDYTKIHNSPYYTLVKEEYWDKTFSAVIPAGLTRNYSFKTGMTSVDQQKMTDTLSMKIGADFGLKFGNATASIKSEISRTLQTEISTTNTEASEETVTSTVISEPGKTTGYTEYQLATKYTLKRADGSIVSDPWVVKNNKITIARKNAQ

SEQ ID NO: 59 - protein, 161 aa, Bacillus sp.
VGVSKQEAFYKLIVASTASKSTKLHLAKSITYGISQTESVDLTFTLGIEAGAKASIGALPGGEVNTKISASIATHFGTSMTISDASTISATYDFDTPPADYLSEYDRYQGALYQVYFKYSIAPDSTLQSFLNTNGASIKYQSYTYKAPRYAEFASYDVKKK

SEQ ID NO: 60 - protein, 161 aa, Artificial Sequence
  synthetic
MGVSKQEAFYKLIVASTASKSTKLHLAKSITYGISQTESVDLTFTLGIEAGAKASIGALPGGEVNTKISASIATHFGTSMTISDASTISATYDFDTPPADYLSEYDRYQGALYQVYFKYSIAPDSTLQSFLNTNGASIKYQSYTYKAPRYAEFASYDVKKK

SEQ ID NO: 61 - protein, 299 aa, Unknown
  Unknown organism from environmental sample
MAIVDLDAYLLALAKKWFPDPISKLITKVDTSSYLTVKNAESYGLEIKSSKPQGTMFMGESELKNDTNETQIIHSDSFTKTISDSVTLSVTNGVSVGVDISIGGKIFGMGVETSMSFEVSTSTTKEQTSTEGVAYTVPSQTVSVPARKTYYVYTALQRSQLEGSIRLRANLSGAYVVYINMDGQEMPVGSFPIYEFIKEYQSLHPLPSGISLNHNDKSIHFEGLAELIYGTGTKFNVTITDTPSSQGIQEHKPFDTKTGLGTYEIQLDGKKLGFDINDLKDKMDPKDFEKLKELQNEIV

SEQ ID NO: 62 - protein, 326 aa, Bacillus sp.
MNSIISFFCSLVEIIKKRRDSMKRIKKIIPAAFVLSSALLVAPGFSSAATDTTNVGNLPVVISSQGAKAPMTAEQAERSGLPIPEAPVGPYQEFPYEAYSTTQYGDLIDYVYVDLYTKTSQTMSTKRLKDMPFLVVLPDGTRVDEIKDDYDVTFTPGKLAYTIGLSKETFKEILSDTKLKKDIYWKLIDSNIVGKNDGYHWSKTVTSGLSKSNTVGFSLSVGFEAGFGDSVSFSTELTTSFESNTTITDETSTTRTFDYNPKPDYAYDQYRTALYQQVAKYSVQPGAKLQEFINGANKSETSKYFEFKLRNAYDYPVNVLVSLTSK

SEQ ID NO: 63 - protein, 279 aa, Artificial Sequence
  synthetic
MATDTTNVGNLPVVISSQGAKAPMTAEQAERSGLPIPEAPVGPYQEFPYEAYSTTQYGDLIDYVYVDLYTKTSQTMSTKRLKDMPFLVVLPDGTRVDEIKDDYDVTFTPGKLAYTIGLSKETFKEILSDTKLKKDIYWKLIDSNIVGKNDGYHWSKTVTSGLSKSNTVGFSLSVGFEAGFGDSVSFSTELTTSFESNTTITDETSTTRTFDYNPKPDYAYDQYRTALYQQVAKYSVQPGAKLQEFINGANKSETSKYFEFKLRNAYDYPVNVLVSLTSK

SEQ ID NO: 64 - protein, 305 aa, Artificial Sequence
  synthetic
MKRIKKIIPAAFVLSSALLVAPGFSSAATDTTNVGNLPVVISSQGAKAPMTAEQAERSGLPIPEAPVGPYQEFPYEAYSTTQYGDLIDYVYVDLYTKTSQTMSTKRLKDMPFLVVLPDGTRVDEIKDDYDVTFTPGKLAYTIGLSKETFKEILSDTKLKKDIYWKLIDSNIVGKNDGYHWSKTVTSGLSKSNTVGFSLSVGFEAGFGDSVSFSTELTTSFESNTTITDETSTTRTFDYNPKPDYAYDQYRTALYQQVAKYSVQPGAKLQEFINGANKSETSKYFEFKLRNAYDYPVNVLVSLTSK

SEQ ID NO: 65 - protein, 281 aa, Aeromonas sp.
MKKFIPLILTLLSTHAMAIETLDERLTRMLKNTDRPAEGVNRGSKYLNHNVTQYVMKGEGIASSIKNVDSYITIDSSTLKNSLDHTVELPVKGFSYEHTDSTSTTNRTGWTFNYQYEATASFDVLFVTGGVTHTLGLQYDMSNEKTHQETITKKWSVDPFMVEVPAGKTYKIDYVFTKVTVSGDSRLDAELFGKYNYQTLQPVTYQEVDLGAATDILDPSKREGFVTVYGPAPHYTSRGVKQTGTSPFSSVKGVDFFVEIRDVTNVSGKGTLVARHSYQRQ

SEQ ID NO: 66 - protein, 264 aa, Artificial Sequence
  synthetic
MIETLDERLTRMLKNTDRPAEGVNRGSKYLNHNVTQYVMKGEGIASSIKNVDSYITIDSSTLKNSLDHTVELPVKGFSYEHTDSTSTTNRTGWTFNYQYEATASFDVLFVTGGVTHTLGLQYDMSNEKTHQETITKKWSVDPFMVEVPAGKTYKIDYVFTKVTVSGDSRLDAELFGKYNYQTLQPVTYQEVDLGAATDILDPSKREGFVTVYGPAPHYTSRGVKQTGTSPFSSVKGVDFFVEIRDVTNVSGKGTLVARHSYQRQ

SEQ ID NO: 67 - protein, 263 aa, Bacillus sp.
MIHSFHDILLHYVEWWKKKQEAMQAEFHYIVPNREHYALSRSKPTTTYKPSRKIKEWSEEVAVNTYENVGIKSKRVTIELSGYVKDHATWGLVNEVNFLGIEYVTMDMSSQLSKISNIPVSLAFGETTMRSRSHQYEAIETVILKPKTRITAKLIIKQKHVTYPFTIEQGLQGYIQIIVTKQNGEVQQSFHHIAAILQKYDIPYAKVANKEAVFFAHGTCQAVFSSDFYMRIKEETLHHLSFAREYTLFSKIPQEHFYRSLQE

SEQ ID NO: 68 - protein, 495 aa, Pseudomonas sp.
LHINFTHKEIVMQIVDLQKGRVNFSANHHLQLLRLKAGLSEDVLPGVEAIGLGYNPFLSYASVDSGAVQLFDWYGARKKNVSFKPGFVVPEIVDAQQNDSERSYTIISGSTIAEYQKNLAISVAIEGKYNFFSGSLSTDYDENSLRNAESEFNRIQQSINLWSLRLPSVKLLRDFMLPHMREQLDELDVMKPEAVSKYFDDVGSHFLTGIVMGGRAILASSTNKLTVKRAYTISGVARVSYEGLTGQLSAEAKAKYGEYISSFTQNSNTHQEVRGGDGTKAQGVFNGREGFQTWVDSVVASPDFVNFGPTIPMQEIWSLCKTDEQADAMKLHYETIWAPAQSEKYRLKPNYIDQLVVITGGSSAIEPPARYVKVPYDLNTGAGGDYIYLCYHEQVWKPDNLQPAVTAIKIIYNQEVTPEGYIKLPHDLNKGAGGEFVYLCYKTDTYSTQNAFNKVTVIGGGNADINAPYGYNKVPGDLNKGAGGEFIYVCTFVGS

SEQ ID NO: 69 - protein, 484 aa, Artificial Sequence
  synthetic
MQIVDLQKGRVNFSANHHLQLLRLKAGLSEDVLPGVEAIGLGYNPFLSYASVDSGAVQLFDWYGARKKNVSFKPGFVVPEIVDAQQNDSERSYTIISGSTIAEYQKNLAISVAIEGKYNFFSGSLSTDYDENSLRNAESEFNRIQQSINLWSLRLPSVKLLRDFMLPHMREQLDELDVMKPEAVSKYFDDVGSHFLTGIVMGGRAILASSTNKLTVKRAYTISGVARVSYEGLTGQLSAEAKAKYGEYISSFTQNSNTHQEVRGGDGTKAQGVFNGREGFQTWVDSVVASPDFVNFGPTIPMQEIWSLCKTDEQADAMKLHYETIWAPAQSEKYRLKPNYIDQLVVITGGSSAIEPPARYVKVPYDLNTGAGGDYIYLCYHEQVWKPDNLQPAVTAIKIIYNQEVTPEGYIKLPHDLNKGAGGEFVYLCYKTDTYSTQNAFNKVTVIGGGNADINAPYGYNKVPGDLNKGAGGEFIYVCTFVGS

SEQ ID NO: 70 - protein, 346 aa, Bacillus sp.
MKIKLSNKKIMARSSIIVLATSFALISPELVNADVINLKKGGEKQQQIAAYLDPIPIPIENVRGLQDLWLSSKEMKAPLADLIGTTPHNLSNLHFNFLYYKEPSYSVDLIKKNEEKPSSSVYMGTTNLSHSGGTSEQTLYSQAFSKTVTSSVTTTITHGAKVGAKAGAKLQVPLVGETAVELNAEYNFAKAGSETSTENVTYTVPSQPVKLRVGESAKVTANLRMAKASGEVRLRTTYTGEIQSNFFVNTPNGPMQDSDITGLGEWMKTLLDFNEDLKNYWDFSPTYVSVAYQDGKGTYNATYGAVLDIHVEIFDGSNKVRKKRDADSKPIRSYSYQVNPEIVKKD

SEQ ID NO: 71 - protein, 314 aa, Artificial Sequence
  synthetic
MDVINLKKGGEKQQQIAAYLDPIPIPIENVRGLQDLWLSSKEMKAPLADLIGTTPHNLSNLHFNFLYYKEPSYSVDLIKKNEEKPSSSVYMGTTNLSHSGGTSEQTLYSQAFSKTVTSSVTTTITHGAKVGAKAGAKLQVPLVGETAVELNAEYNFAKAGSETSTENVTYTVPSQPVKLRVGESAKVTANLRMAKASGEVRLRTTYTGEIQSNFFVNTPNGPMQDSDITGLGEWMKTLLDFNEDLKNYWDFSPTYVSVAYQDGKGTYNATYGAVLDIHVEIFDGSNKVRKKRDADSKPIRSYSYQVNPEIVKKD

SEQ ID NO: 72 - protein, 325 aa, Unknown
  Unknown organism from environmental sample
LNGYFQKILFEGGIRIVITNIEQSTIHYMIWYATHYLHANPNTFYNIGLYPYEIHNLSIVPKFNHITVNPSQKDTVIQTIENNTDVEQYRTIEFYEKTTENITNYTTAGYSIYEGIKSTFTCNIQVNFLLSGGLEESLEVPVHSECKCYDTETTNTTYSKLWQVKQTVMIPPHSRIHANLIIMGTNIKIPMQLSANIKGTHVHNSKSNYFSSLSFQQQDGSKVQARFCASNLSQDAWPNKPVSFRSPGPYSSLNLTGDAITTIEPGLYAMIRFEQSPINGSLQERKVWYSDRILLRDGREIRLSNFNPLTGKASCIDVDTMRIGN

SEQ ID NO: 73 - protein, 325 aa, Artificial Sequence
  synthetic
MNGYFQKILFEGGIRIVITNIEQSTIHYMIWYATHYLHANPNTFYNIGLYPYEIHNLSIVPKFNHITVNPSQKDTVIQTIENNTDVEQYRTIEFYEKTTENITNYTTAGYSIYEGIKSTFTCNIQVNFLLSGGLEESLEVPVHSECKCYDTETTNTTYSKLWQVKQTVMIPPHSRIHANLIIMGTNIKIPMQLSANIKGTHVHNSKSNYFSSLSFQQQDGSKVQARFCASNLSQDAWPNKPVSFRSPGPYSSLNLTGDAITTIEPGLYAMIRFEQSPINGSLQERKVWYSDRILLRDGREIRLSNFNPLTGKASCIDVDTMRIGN

SEQ ID NO: 74 - protein, 330 aa, Chryseobacterium sp.
MIKKINSIGILLLMFSVSCSRDEVSTITDDSEKVNYSEVKKSHLTEAEMLQKGWKIVDEFKLSGNDSLRTNYSSSNEEREIPFKSNHLKDMGYDTSYSGERTRLKNVFAYSGQVPDGIIFNPDLSVDGDARNTAPNPNVSIVLGTPEVSIKTDGVDLPDNAYTTEAINNGDRESEITVTYSYKKGYSTSWKRTVSGSFEVAASVSVDIPLVAKASASTKVVVGGDTTEGTENSEEITETSSYKTIVPAHSKKSISILTKLKGSSVEYFVPMKLTGRLQANFPSPVDGHYYWAFPIESFPDFLSNIHGESGIVKSVSNVSVTVLESPAQQI

SEQ ID NO: 75 - protein, 310 aa, Artificial Sequence
  synthetic
MDEVSTITDDSEKVNYSEVKKSHLTEAEMLQKGWKIVDEFKLSGNDSLRTNYSSSNEEREIPFKSNHLKDMGYDTSYSGERTRLKNVFAYSGQVPDGIIFNPDLSVDGDARNTAPNPNVSIVLGTPEVSIKTDGVDLPDNAYTTEAINNGDRESEITVTYSYKKGYSTSWKRTVSGSFEVAASVSVDIPLVAKASASTKVVVGGDTTEGTENSEEITETSSYKTIVPAHSKKSISILTKLKGSSVEYFVPMKLTGRLQANFPSPVDGHYYWAFPIESFPDFLSNIHGESGIVKSVSNVSVTVLESPAQQI

SEQ ID NO: 76 - protein, 239 aa, Serratia sp.
MLDKKKASISSPVITKNLFIRLVADDNNFDNIISITDPSVLILALKTAALFQGALVPAENNSLRFDVQKAMELVNQNPELSVTNYTDIKKETSDSRTSVMTDMVLSTIKTVLGIVLAPAPAQQLQSAIEGAYVGLDETKDSAWIFWEKKKDTKTTYQYNITFSVEAGPTGLVLLTCPMGLTIEVNKEYERVLFITLTDKESYSCRIQALTTAQLAKPAAKNAEAAEVLSVLIGDGPRRV

SEQ ID NO: 77 - protein, 318 aa, Bacillus sp.
MKLKVLVTTGLALTLGLTRIGTIATPTYAAVAENPNPDIENNKDKYIVNNMLKFASFSTTGFEKTSEEKTLKAIDYVVNDNSANSEPSTRRAPTKTHSTRDSLTINASAEIGVGSEMSASASIPGIEAVTSKITTGLKVSTGVNKFSSETNTLSYGSDDIVAKPYQTVRVDYYLEELKTSGIMNTGTRITEIGDNLEIQSVIEGTIGGSDGPKMYERYAPEHLSGEEVYNAFKRMEEKNKETPIALAKKDNGEYWLIIPEGKLSNYFFIDDVAKTVSTVGAQAKFDGIAGTGLTWRTSTIDPATQQQTPVAEGQVQQP

SEQ ID NO: 78 - protein, 288 aa, Artificial Sequence
  synthetic
MAENPNPDIENNKDKYIVNNMLKFASFSTTGFEKTSEEKTLKAIDYVVNDNSANSEPSTRRAPTKTHSTRDSLTINASAEIGVGSEMSASASIPGIEAVTSKITTGLKVSTGVNKFSSETNTLSYGSDDIVAKPYQTVRVDYYLEELKTSGIMNTGTRITEIGDNLEIQSVIEGTIGGSDGPKMYERYAPEHLSGEEVYNAFKRMEEKNKETPIALAKKDNGEYWLIIPEGKLSNYFFIDDVAKTVSTVGAQAKFDGIAGTGLTWRTSTIDPATQQQTPVAEGQVQQP

SEQ ID NO: 79 - protein, 280 aa, Bacillus sp.
VEVINMAILDIWTEVDKFATNYCKVRGLTYSGKRGSVPQYPLILTKFQSSLPDDRVLTPPEHVVTLPKTYDNITSQTQTTTLEFSEEITESSSTTTTTGVTIGTELSSTQTFKIKFVEVGLTQTVSSEYTTTSSKTLTTEHKRVVTSAEHITVQPYTRIKAVLVIENGIYDLITNITCDLNGLIYFDATNGTSFLTTIYEVLKGNNTPGFTFSFEDPEDPTCHFNGSGKIKGNSGLNSYVRVEELPLEGHSGQYRQYILPGQDLTTDIITSENFGIPIFN

SEQ ID NO: 80 - protein, 275 aa, Artificial Sequence
  synthetic
MAILDIWTEVDKFATNYCKVRGLTYSGKRGSVPQYPLILTKFQSSLPDDRVLTPPEHVVTLPKTYDNITSQTQTTTLEFSEEITESSSTTTTTGVTIGTELSSTQTFKIKFVEVGLTQTVSSEYTTTSSKTLTTEHKRVVTSAEHITVQPYTRIKAVLVIENGIYDLITNITCDLNGLIYFDATNGTSFLTTIYEVLKGNNTPGFTFSFEDPEDPTCHFNGSGKIKGNSGLNSYVRVEELPLEGHSGQYRQYILPGQDLTTDIITSENFGIPIFN

SEQ ID NO: 81 - protein, 205 aa, Bacillus sp.
MIIQEKLSFSDLDSLDSTTDSILDAFKDLYGILPDEIALNNETFPIHNKPAITERYDHACYKMLGPFIFRDLEEPSINEITLKEQFVCNPNNEEKEIVVTIEEQWVNIQSWTSKSITGLTLKSDLIIAGKFQSGNEFNISTFVGESNSKSIHICPSIEHSIKVPPNSKINIAMIGTLITEVLHFQSFITVQGMFSTYGSWTLCWV

SEQ ID NO: 82 - protein, 194 aa, Unknown
  Unknown organism from environmental sample
LAASFKTVIEVGPAHLDQARALARAFQEAIAPATVNYDFDHIRDAAAAIPDSSIVKMVRGWGLQEHAPVLVMVLSLKEAVRQALPPESAEASFWATVERELVDAFTGLAAQEGLPGLSYYEEGADRTRYYRDLFFALQDEETGGHMYALAFCIDVTIGLDKARVGALEMTDAVPFALRLNAIVVRQELARALTA

SEQ ID NO: 83 - protein, 194 aa, Artificial Sequence
  synthetic
MAASFKTVIEVGPAHLDQARALARAFQEAIAPATVNYDFDHIRDAAAAIPDSSIVKMVRGWGLQEHAPVLVMVLSLKEAVRQALPPESAEASFWATVERELVDAFTGLAAQEGLPGLSYYEEGADRTRYYRDLFFALQDEETGGHMYALAFCIDVTIGLDKARVGALEMTDAVPFALRLNAIVVRQELARALTA

SEQ ID NO: 84 - protein, 298 aa, Unknown
  Unknown organism from environmental sample
MAIVDLDAYLVALAKKVFPDPFNKYITRVDSSYLTVKNAESYGFEIKNSKPQGTMFMGESVLKNDTNETQIIHSDSFTKTITDSVTLSVTNGVSVGVNISIGGKIFGMGVETSMSFEVSTSTTREQTSTEGVAYTVPSQTVSVPARKTYYVYTALQRSQLEGSIRLRANLSGIFLIFMNMGGQEVPLLSPNIYEFIKEYQSLHPLPSGISLNHNDKSIHFEGVAELIYGTGTKFNVTIADTPSSQGTQEHKTFDAKTGLGTYEINLDGKKSGFDLNDLKDQMEPEVFEKLKELQNEIV

SEQ ID NO: 85 - protein, 1266 aa, Bacillus sp.
LNHKIINTGGMGDQSRYPLANAPSAELQDMNYIEWLDNCTLKEQVELFRDTSTTVRDALATTAGIITALLSVSNPVAAAASGIIALLIPQLWPSGSDEVTWEKFMAASEILIQKQITEAVRNKALSELEGMYRTIQLYERAAKDWNRNKNDPEAKERIRTQFRATNTAIELIMPSFRVSGFEIPLLNVYAQAANLQLTLLRDAVKFGYDWGLPQDEVEGIYSAQLIPRISEHTDHCVRYYNIGVEEAKKLKANLNDYARYPWAQYINHSKIQGIENWNLFNDYRRNMTILVLDLVALWPTYDPRRYSMVTKSELTRELYTSVRGAFYGHNNDYDQNFEEIERNIISPPHLVTWPINFTVYTQNDYYYPMAGLQHKFNYTESIVSLESPVTGVTGTSNLINFVTADPFILAVTIIGFGQLGTSLGIYAMSFGRKSGSISHVGDIEIGTDDYLDIVDRIPVGDSTPNKLSWMSAAPTTLGSTTFLQYVSYAWRHPSVDSNNRISIDKITQIPAVKAFFIDDNHVKVIKGPGSTGGDLVAFSREGYGLSILVFIPGSDLVSFYRVRIRYASSQSAKVTMGFGGGVEESESKFNFPATYSGGNLTYNSFGYINTLAIASQSTAQTIEVYFRQYEEAEFIVDKLEFIPMEMSLEEYQADQDLEKARKAVNALFTSDAKSELKVNITDYAVDQAANLVECVSEDFHAQEKRILLDQVKFAKRLSQARNLLNYGDFESLDWSGENGWRTSPHVHVASDNPIFKGRYLHMPGAMSPQYSNNTYPTYAYQKVDESKLKSYTRYLVRGFVGNSKDLELLVERYGKDVHVEMNVPNDIQYSLPMNECGGFDRCKPASYQTTTPHSCTCKDTAVAHTDCQCKDKGNRTSTNMYTNVPIDGDMYPNGFHAHKSCGCGDKQMNKNGTHPHKSCGCKDPHVFTYHIDTGCVDMEENVGLFFALKIASENGIANIDNLEIIEAQPLTGEALARVKKREQRWKQERDKKRLEADKAVQAAQKAIQGLFTNTQQNRLKFETLFPQIVEAEMLVQQIPYLYHDYLLGAIPPVPGMNDEIYQQLSVSIGNAHALYEERNLIRNGTFRSGTGHWHVTEGVEVQQLQNTSVLVLSEWSHEASQQWRIDPDRGYVLRVTARKEGGGKGTVTMSDCADYTETLTFTACDYNTLGSQTTTSGTLSGFVTKTLEIFPDTDRIRIDIGETEGAFQVESVELICMEQMEDRMYDMAGNVEEEMQYLQESGSVRNTSGSDCNTIPDFLGGPCPSP

SEQ ID NO: 86 - protein, 1266 aa, Artificial Sequence
  synthetic
MNHKIINTGGMGDQSRYPLANAPSAELQDMNYIEWLDNCTLKEQVELFRDTSTTVRDALATTAGIITALLSVSNPVAAAASGIIALLIPQLWPSGSDEVTWEKFMAASEILIQKQITEAVRNKALSELEGMYRTIQLYERAAKDWNRNKNDPEAKERIRTQFRATNTAIELIMPSFRVSGFEIPLLNVYAQAANLQLTLLRDAVKFGYDWGLPQDEVEGIYSAQLIPRISEHTDHCVRYYNIGVEEAKKLKANLNDYARYPWAQYINHSKIQGIENWNLFNDYRRNMTILVLDLVALWPTYDPRRYSMVTKSELTRELYTSVRGAFYGHNNDYDQNFEEIERNIISPPHLVTWPINFTVYTQNDYYYPMAGLQHKFNYTESIVSLESPVTGVTGTSNLINFVTADPFILAVTIIGFGQLGTSLGIYAMSFGRKSGSISHVGDIEIGTDDYLDIVDRIPVGDSTPNKLSWMSAAPTTLGSTTFLQYVSYAWRHPSVDSNNRISIDKITQIPAVKAFFIDDNHVKVIKGPGSTGGDLVAFSREGYGLSILVFIPGSDLVSFYRVRIRYASSQSAKVTMGFGGGVEESESKFNFPATYSGGNLTYNSFGYINTLAIASQSTAQTIEVYFRQYEEAEFIVDKLEFIPMEMSLEEYQADQDLEKARKAVNALFTSDAKSELKVNITDYAVDQAANLVECVSEDFHAQEKRILLDQVKFAKRLSQARNLLNYGDFESLDWSGENGWRTSPHVHVASDNPIFKGRYLHMPGAMSPQYSNNTYPTYAYQKVDESKLKSYTRYLVRGFVGNSKDLELLVERYGKDVHVEMNVPNDIQYSLPMNECGGFDRCKPASYQTTTPHSCTCKDTAVAHTDCQCKDKGNRTSTNMYTNVPIDGDMYPNGFHAHKSCGCGDKQMNKNGTHPHKSCGCKDPHVFTYHIDTGCVDMEENVGLFFALKIASENGIANIDNLEIIEAQPLTGEALARVKKREQRWKQERDKKRLEADKAVQAAQKAIQGLFTNTQQNRLKFETLFPQIVEAEMLVQQIPYLYHDYLLGAIPPVPGMNDEIYQQLSVSIGNAHALYEERNLIRNGTFRSGTGHWHVTEGVEVQQLQNTSVLVLSEWSHEASQQWRIDPDRGYVLRVTARKEGGGKGTVTMSDCADYTETLTFTACDYNTLGSQTTTSGTLSGFVTKTLEIFPDTDRIRIDIGETEGAFQVESVELICMEQMEDRMYDMAGNVEEEMQYLQESGSVRNTSGSDCNTIPDFLGGPCPSP

SEQ ID NO: 87 - protein, 644 aa, Artificial Sequence
  synthetic
MNHKIINTGGMGDQSRYPLANAPSAELQDMNYIEWLDNCTLKEQVELFRDTSTTVRDALATTAGIITALLSVSNPVAAAASGIIALLIPQLWPSGSDEVTWEKFMAASEILIQKQITEAVRNKALSELEGMYRTIQLYERAAKDWNRNKNDPEAKERIRTQFRATNTAIELIMPSFRVSGFEIPLLNVYAQAANLQLTLLRDAVKFGYDWGLPQDEVEGIYSAQLIPRISEHTDHCVRYYNIGVEEAKKLKANLNDYARYPWAQYINHSKIQGIENWNLFNDYRRNMTILVLDLVALWPTYDPRRYSMVTKSELTRELYTSVRGAFYGHNNDYDQNFEEIERNIISPPHLVTWPINFTVYTQNDYYYPMAGLQHKFNYTESIVSLESPVTGVTGTSNLINFVTADPFILAVTIIGFGQLGTSLGIYAMSFGRKSGSISHVGDIEIGTDDYLDIVDRIPVGDSTPNKLSWMSAAPTTLGSTTFLQYVSYAWRHPSVDSNNRISIDKITQIPAVKAFFIDDNHVKVIKGPGSTGGDLVAFSREGYGLSILVFIPGSDLVSFYRVRIRYASSQSAKVTMGFGGGVEESESKFNFPATYSGGNLTYNSFGYINTLAIASQSTAQTIEVYFRQYEEAEFIVDKLEFIPM

SEQ ID NO: 88 - protein, 337 aa, Bacillus sp.
MEVRHRMDSDNVFKVDVDGFVKISQKKMFNVETLTAISSLGGNILKQVYTDAHLSSRNFNKNFRTLVIGSMALIPYGGIFIAPQIGLLGPENVDPQKNQVKKRMEQLATRMDEKISEYDFNDLIKEVKVLMNILRPFEDLLNGKLHVSESYFSKGKMQKNNHTAVKCINDAFLKVIDQIQKDKQKEGKLPIFTIIATTHIQFLYFIEINRNHSKIQFNTEDFKQCIISDFKKTTEEYVDYIQKTYQMGRQKFIKKMQNIAKAEIGIYSLDEQEILNEMRMHYKQIFMNEATAASFAAKKKVVDLAIAINEYENLMFEKNLYYHETWGNEAFLEVAKL

SEQ ID NO: 89 - protein, 279 aa, Chryseobacterium sp.
MNSLQQITDAWGKWYSQQHGTTCRFTASTDYSSQSFLNDYHQYQVSTTTQNIVYDSNSLPTNGSDVAFETIYNNNTQVSNQQSLIETETSTQAFEWSITEALAIGVEISATEGVPAVASSTQKVTVNLSLSSTQKSTVTNTQSWSVNTMLTIPPQSSIKADIVIGTQSYNINFTVSVMLNGYVAIWNNDKVNGHWLWFIPITQVFSDCIANNIIDTSGYDIVGGGVSTTASGVFTGSQGVNVVVNTIQYPLNSNDTSAKNSDFIDNPNVNTIVAMAGKE

SEQ ID NO: 90 - protein, 516 aa, Bacillus sp.
MSKKKITKKALLVTVAVLTLGSGPVSTFGGAISAYAAETTAGPSFEITSNGVVKSLNGNTENIGALAGILATNYIDSVRNGVSSTDSLINLSRQLVIGSVGMIPYGGSFVAPFLGMLWPTAGPSQMQVIMEQVSSLIDEKIEIYDGSAIKKQFEALMEQVQKFEDSVNNKPYNTPPGVQLSQTNMQSSNSAVALQLQGKFIDLLKACEKDGQKEAELPVFTAVATAHLVFLKFMEQNGETHSRIKMDPSILKTYFTNDMKKKAQEYRDYIFKTSRNGQQKIYQKMTSFPDGTYSTDSNEVYNALIDSQMKSIAAGGDGKRYKDAMEPYKKTAEQLQNYVNVTEDSQAFKIIVESIIGSPESVAPGDFETHDIVLSVNGKNVLATDKGEIRADSNIVGGWEKLTLIRASNTDKDNIYALRATGSNNKFVAFNTVGGKVTVDATSESDPRAKFKLISLGNGKYAIKPLNTNGNLVYANFHSNGPLSVNSREITDWSTFTISAYTGGPVKDKNGNPIFK

SEQ ID NO: 91 - protein, 481 aa, Artificial Sequence
  synthetic
MAETTAGPSFEITSNGVVKSLNGNTENIGALAGILATNYIDSVRNGVSSTDSLINLSRQLVIGSVGMIPYGGSFVAPFLGMLWPTAGPSQMQVIMEQVSSLIDEKIEIYDGSAIKKQFEALMEQVQKFEDSVNNKPYNTPPGVQLSQTNMQSSNSAVALQLQGKFIDLLKACEKDGQKEAELPVFTAVATAHLVFLKFMEQNGETHSRIKMDPSILKTYFTNDMKKKAQEYRDYIFKTSRNGQQKIYQKMTSFPDGTYSTDSNEVYNALIDSQMKSIAAGGDGKRYKDAMEPYKKTAEQLQNYVNVTEDSQAFKIIVESIIGSPESVAPGDFETHDIVLSVNGKNVLATDKGEIRADSNIVGGWEKLTLIRASNTDKDNIYALRATGSNNKFVAFNTVGGKVTVDATSESDPRAKFKLISLGNGKYAIKPLNTNGNLVYANFHSNGPLSVNSREITDWSTFTISAYTGGPVKDKNGNPIFK

SEQ ID NO: 92 - protein, 1501 aa, Bacillus sp.
MIKGLKNLCLINKRSFRLGSLFQWIMDSDNFITFFYTFIPCAYIFKNFVTEPKGNVGDKNRCPHIDSMNRELENKNIGGVSMSQTEVMNVIQATEIEGIKRSQEKYPNRKLSVFQDNILSANLYANSKQPFLTTITDNQEINKKNHKDYLKKAVPVGDRVGRNMNPQTQAIDLQTGISTALSISSILSFHPVVGSALGLIRSILPLLWPPQSQDPNKVWQSMMATAEELIDEKIDTAMRNLAIAKLNGIKSLIDYFNNLVSILAQDPNNTNKREAVLNAYRDVDRSFIESMPQFAVPGWETQLLPVYVEAGNLHLLFLLDAVRFGSEWNMQQWEIDLNYGYLKNNIKLYTNHCVGWFNTGLQRLNPATKPANMKNCTKYPWTAYDQYYDINPSRDCTSALLTSICEEKTNESPLQVASVYGYRDSSGEYQGLENWNLYNNFRRDMTIMALDILPAWPTYDPQLYPDMGVKTELTREVYTQIRGTTYRSNTSQNTINAIESRMIRPPSLFTWLTKLEFRQINIPKPGQLPSYPYTAGDLLVGGSQYLKYTMGDSYEEKFGKSGTLPVKTVNLTPESSITHIQTKQWFEPREIALYKKDQHLFTLGTIEEKNPHFTHTPGCFYAKECVYDPTLRVNQTPKVIDPNNPNAPSSEWKNSHRLSYFKYEPIRSDSPYGYPNDGQIGAVTFGWTHMLVDPYNTVAKDRVTQIPVVKAQVIIGDKSRVIKGPGSTGGDLVELANGERIRIMFTSLAGSYHYRTRIRYASNKQTDLTFYIAGAGTKRYTAPATTTTMTDLTYEKFGYLETSLYSYSSVSDSVGPIEIESIGSATGSFVIDKIEFIPIEESLEEYEANQMLKRARKVVNALFSDNAKQRLRDNLMGIDLDIAMGLVEEIPDDRFPKEKMILRDQIKQAKRLSQSRNLLQYGDFASPVWSGENGWTISNSVSVEATNPILHGKYLNLPSARDPLSDGTLYPSYVYQKVEESKLKPYTRYWIRGLIGNSKNLELIVSRYRKEVHKILHVPDNLNLMSLRSHLESLSGPEILEQVPQTRPDPSCGMYSPLIQTNNPDEDPHIFACHIDVGELDFDCNLGIEVALKIHTVDGRAQVRYLELIEGAPLTSEEVARVKRQEKKWKQKRKQTFTQNQEAIQAAQEAINRLFVSPTCGRLKLTTTLQDIEYAKTLVDAIPDRYNPILPALSGLNMDIFGRLQNQLELAYGLYNNRNVIVDGDFMSGLANWNATEGAEMQQIDGTSVVVISDWGANVSQEVCVNPEHGYLLRVTARKEGLGKGYVTISDCTENNTETVTFVSDEERMASTESLRDSSIETTSRRETPHVNDSHTLHVPSDQYGRNTSYTGNLNGKYSSESFGFTPYGDSNQMMNYPPTHNEMNVYANNPNMTSGHEAGCGYGCSTNAYAQEYKRMNRPSNQDEMNAYPMNENTLNNDEANAYETASYASPTPVQNSTFLSGYVTKTVEIFPETNRVRIEMGETEGKFMIESVELIRMEC

SEQ ID NO: 93 - protein, 1420 aa, Artificial Sequence
  synthetic
MSQTEVMNVIQATEIEGIKRSQEKYPNRKLSVFQDNILSANLYANSKQPFLTTITDNQEINKKNHKDYLKKAVPVGDRVGRNMNPQTQAIDLQTGISTALSISSILSFHPVVGSALGLIRSILPLLWPPQSQDPNKVWQSMMATAEELIDEKIDTAMRNLAIAKLNGIKSLIDYFNNLVSILAQDPNNTNKREAVLNAYRDVDRSFIESMPQFAVPGWETQLLPVYVEAGNLHLLFLLDAVRFGSEWNMQQWEIDLNYGYLKNNIKLYTNHCVGWFNTGLQRLNPATKPANMKNCTKYPWTAYDQYYDINPSRDCTSALLTSICEEKTNESPLQVASVYGYRDSSGEYQGLENWNLYNNFRRDMTIMALDILPAWPTYDPQLYPDMGVKTELTREVYTQIRGTTYRSNTSQNTINAIESRMIRPPSLFTWLTKLEFRQINIPKPGQLPSYPYTAGDLLVGGSQYLKYTMGDSYEEKFGKSGTLPVKTVNLTPESSITHIQTKQWFEPREIALYKKDQHLFTLGTIEEKNPHFTHTPGCFYAKECVYDPTLRVNQTPKVIDPNNPNAPSSEWKNSHRLSYFKYEPIRSDSPYGYPNDGQIGAVTFGWTHMLVDPYNTVAKDRVTQIPVVKAQVIIGDKSRVIKGPGSTGGDLVELANGERIRIMFTSLAGSYHYRTRIRYASNKQTDLTFYIAGAGTKRYTAPATTTTMTDLTYEKFGYLETSLYSYSSVSDSVGPIEIESIGSATGSFVIDKIEFIPIEESLEEYEANQMLKRARKVVNALFSDNAKQRLRDNLMGIDLDIAMGLVEEIPDDRFPKEKMILRDQIKQAKRLSQSRNLLQYGDFASPVWSGENGWTISNSVSVEATNPILHGKYLNLPSARDPLSDGTLYPSYVYQKVEESKLKPYTRYWIRGLIGNSKNLELIVSRYRKEVHKILHVPDNLNLMSLRSHLESLSGPEILEQVPQTRPDPSCGMYSPLIQTNNPDEDPHIFACHIDVGELDFDCNLGIEVALKIHTVDGRAQVRYLELIEGAPLTSEEVARVKRQEKKWKQKRKQTFTQNQEAIQAAQEAINRLFVSPTCGRLKLTTTLQDIEYAKTLVDAIPDRYNPILPALSGLNMDIFGRLQNQLELAYGLYNNRNVIVDGDFMSGLANWNATEGAEMQQIDGTSVVVISDWGANVSQEVCVNPEHGYLLRVTARKEGLGKGYVTISDCTENNTETVTFVSDEERMASTESLRDSSIETTSRRETPHVNDSHTLHVPSDQYGRNTSYTGNLNGKYSSESFGFTPYGDSNQMMNYPPTHNEMNVYANNPNMTSGHEAGCGYGCSTNAYAQEYKRMNRPSNQDEMNAYPMNENTLNNDEANAYETASYASPTPVQNSTFLSGYVTKTVEIFPETNRVRIEMGETEGKFMIESVELIRMEC

SEQ ID NO: 94 - protein, 758 aa, Artificial Sequence
  synthetic
MSQTEVMNVIQATEIEGIKRSQEKYPNRKLSVFQDNILSANLYANSKQPFLTTITDNQEINKKNHKDYLKKAVPVGDRVGRNMNPQTQAIDLQTGISTALSISSILSFHPVVGSALGLIRSILPLLWPPQSQDPNKVWQSMMATAEELIDEKIDTAMRNLAIAKLNGIKSLIDYFNNLVSILAQDPNNTNKREAVLNAYRDVDRSFIESMPQFAVPGWETQLLPVYVEAGNLHLLFLLDAVRFGSEWNMQQWEIDLNYGYLKNNIKLYTNHCVGWFNTGLQRLNPATKPANMKNCTKYPWTAYDQYYDINPSRDCTSALLTSICEEKTNESPLQVASVYGYRDSSGEYQGLENWNLYNNFRRDMTIMALDILPAWPTYDPQLYPDMGVKTELTREVYTQIRGTTYRSNTSQNTINAIESRMIRPPSLFTWLTKLEFRQINIPKPGQLPSYPYTAGDLLVGGSQYLKYTMGDSYEEKFGKSGTLPVKTVNLTPESSITHIQTKQWFEPREIALYKKDQHLFTLGTIEEKNPHFTHTPGCFYAKECVYDPTLRVNQTPKVIDPNNPNAPSSEWKNSHRLSYFKYEPIRSDSPYGYPNDGQIGAVTFGWTHMLVDPYNTVAKDRVTQIPVVKAQVIIGDKSRVIKGPGSTGGDLVELANGERIRIMFTSLAGSYHYRTRIRYASNKQTDLTFYIAGAGTKRYTAPATTTTMTDLTYEKFGYLETSLYSYSSVSDSVGPIEIESIGSATGSFVIDKIEFIPI

SEQ ID NO: 95 - protein, 504 aa, Pseudomonas sp.
MLIPCSLDELFYLPTKHKEITMENIDLPQGLVNFSTQHLQLIRFKAGLNETVLPGVEAIGLGYNPFISYASVNSGAVQLFDWATAKKREVPFKAGYFVPEIVDVQQNDSATYTNVSGNTISEYQRSLATSVAIEGRYNFFSGSLSTDFDSNSLRNAENEFTRIQQSINLWSLRLPSVKSLRELMLPHMRQQLDELNVNDPKAISRYFDRVGSHFLTGIVMGGRAILASSTNKLRVKRDYSVSVVAKASYEGLTGQLSAEAKAKYGESISSFTQYSNTHQEVRGGDGAKAHGVFSGKKEDFQAWVDSVSASPDFVDFVPTIPMQEIWTLCSNEAQAEAMRKHYDDVWAPAQSEKYRVKANYIDQLVVITGGSSTIEPPVGYSKIEYDLNAGAGGDFIYLCYHEQTWQADRPKDAVTDIRIIFNKEPTPPGYTKLPQDLNKGAGGDDVFLCYKTEAYNTDTAINKVTVIGGNNADINAPYGYLKVPGDLNRGAGGNFIYACTFVGK

SEQ ID NO: 96 - protein, 483 aa, Artificial Sequence
  synthetic
MENIDLPQGLVNFSTQHLQLIRFKAGLNETVLPGVEAIGLGYNPFISYASVNSGAVQLFDWATAKKREVPFKAGYFVPEIVDVQQNDSATYTNVSGNTISEYQRSLATSVAIEGRYNFFSGSLSTDFDSNSLRNAENEFTRIQQSINLWSLRLPSVKSLRELMLPHMRQQLDELNVNDPKAISRYFDRVGSHFLTGIVMGGRAILASSTNKLRVKRDYSVSVVAKASYEGLTGQLSAEAKAKYGESISSFTQYSNTHQEVRGGDGAKAHGVFSGKKEDFQAWVDSVSASPDFVDFVPTIPMQEIWTLCSNEAQAEAMRKHYDDVWAPAQSEKYRVKANYIDQLVVITGGSSTIEPPVGYSKIEYDLNAGAGGDFIYLCYHEQTWQADRPKDAVTDIRIIFNKEPTPPGYTKLPQDLNKGAGGDDVFLCYKTEAYNTDTAINKVTVIGGNNADINAPYGYLKVPGDLNRGAGGNFIYACTFVGK

SEQ ID NO: 97 - protein, 335 aa, Bacillus sp.
MKHFKKGMIVTVTVCSLGLTGLGGTAAFAAENEQVKEHSPIISNFSGGKRMKFNQFTEWVLKGDNHLAPAEYTEIQDLRETGTEYKSLDKFILKNDTDVARELPVPKKTFSRTDSLTLTKSKDFKFGQEIGYEYGNNQSMHKITGKLSFEQHIGSSNSTLKSETETVEYGGGSHKLEPGQEIQVEYLYEQKKYEGKAVNSKEIQGDLGNKMSAIVFYYGPGHNHIDATADMHRGGQYPDNDPLRLSTAYDILKPRTKNSEKQTCLYMVFPHQDDSYHISVDDLENKLVFNDEKKKVYLKEDTATFKGLTGVKVTQTITDVKSGKVLSENPVHYLK

SEQ ID NO: 98 - protein, 307 aa, Artificial Sequence
  synthetic
MAENEQVKEHSPIISNFSGGKRMKFNQFTEWVLKGDNHLAPAEYTEIQDLRETGTEYKSLDKFILKNDTDVARELPVPKKTFSRTDSLTLTKSKDFKFGQEIGYEYGNNQSMHKITGKLSFEQHIGSSNSTLKSETETVEYGGGSHKLEPGQEIQVEYLYEQKKYEGKAVNSKEIQGDLGNKMSAIVFYYGPGHNHIDATADMHRGGQYPDNDPLRLSTAYDILKPRTKNSEKQTCLYMVFPHQDDSYHISVDDLENKLVFNDEKKKVYLKEDTATFKGLTGVKVTQTITDVKSGKVLSENPVHYLK

SEQ ID NO: 99 - protein, 295 aa, Bacillus sp.
LDMKKKTILCSIIASTLLGGGTLVNTASAAEIPKENNNIVNYKDIRQQGAIIDIDQKIDNMLKAIPRDPFGNGAFRDDESEEKFNVSGINIKETNATNITPLFLGQNTFNNASDLEQTYNTSEFSQSITQETSTTTQLGFNASTTAGGKAGIPFVAEGEVSATLEFNYSHTGTDTSSTTNTITAPSQSVKVPAHKIYKAEVYFEKKKTSGQVEMYADILTHANQGRNRMTIGEALDKTENKYGLIKSPNDPDQVRAKGNGHFTIEYGTNLIVETYDITSGQKSAKLIDTKTISLK

SEQ ID NO: 100 - protein, 267 aa, Artificial Sequence
  synthetic
MAEIPKENNNIVNYKDIRQQGAIIDIDQKIDNMLKAIPRDPFGNGAFRDDESEEKFNVSGINIKETNATNITPLFLGQNTFNNASDLEQTYNTSEFSQSITQETSTTTQLGFNASTTAGGKAGIPFVAEGEVSATLEFNYSHTGTDTSSTTNTITAPSQSVKVPAHKIYKAEVYFEKKKTSGQVEMYADILTHANQGRNRMTIGEALDKTENKYGLIKSPNDPDQVRAKGNGHFTIEYGTNLIVETYDITSGQKSAKLIDTKTISLK

SEQ ID NO: 101 - protein, 293 aa, Artificial Sequence
  synthetic
MKKKTILCSIIASTLLGGGTLVNTASAAEIPKENNNIVNYKDIRQQGAIIDIDQKIDNMLKAIPRDPFGNGAFRDDESEEKFNVSGINIKETNATNITPLFLGQNTFNNASDLEQTYNTSEFSQSITQETSTTTQLGFNASTTAGGKAGIPFVAEGEVSATLEFNYSHTGTDTSSTTNTITAPSQSVKVPAHKIYKAEVYFEKKKTSGQVEMYADILTHANQGRNRMTIGEALDKTENKYGLIKSPNDPDQVRAKGNGHFTIEYGTNLIVETYDITSGQKSAKLIDTKTISLK

SEQ ID NO: 102 - protein, 679 aa, Unknown
  Unknown organism from environmental sample
VKNMNSYGNKSDYEILDASSNNTNMPNRYPFANDRNMSPMSWNDCQGVSWNEVWESTGSITSIGIDLINFIEEPSLSAINLLFSIIGKLLPDKTPSVSALTICDLLSIIRKEVAESVLNDGVADFNGKVANYREYYLPALKKWIEAGKPGPDIPSSNIKQVIDLFKRYEEGFNEILAGSLSRQNGQILLLPTYAQAANLQLLLLRDAVKYEKEWGTLLSTEKVRGEVECPFTGDYGERLKCKIKQYTNYCVYWYQVGLNQIKEEGKSAEIWLKFNKFRREMTLAVLDIIAIFPTYDIENYPLQTKVELSRIIYTDPVGFNKEGLIYPWYSPYNNANFEQLELGTIRGPYLSTWLDYTDIYSSTFTTPQYYTLKVWSGNVNRMNLIGGTVERQDGSIVGTPQRVNVSNTDIFKVELTAGVHQFIIDYNSPNSLRSYGIINSKFFKANGSTQTYEGSVGSMHTQGIVVALPGELSEVPTANDYTHRLSDVINLTGGLSQHGSNYSIRSSIVAHGWTHKSLTRTNIVGANKITQIPAVKSYSLSGGLTVRHVSDHTGGDVVYFSQVGRVKILCTFTSTGYYKMRIRYASEYTATMTVNGIPVSLLSTTRVRSNLPYEAFQYAQVGPDHVFAVLTPETLEFNIYGGVNGLMIDKIEFIPSNITTLEYERERNLENAVNDLFTN

SEQ ID NO: 103 - protein, 676 aa, Artificial Sequence
  synthetic
MNSYGNKSDYEILDASSNNTNMPNRYPFANDRNMSPMSWNDCQGVSWNEVWESTGSITSIGIDLINFIEEPSLSAINLLFSIIGKLLPDKTPSVSALTICDLLSIIRKEVAESVLNDGVADFNGKVANYREYYLPALKKWIEAGKPGPDIPSSNIKQVIDLFKRYEEGFNEILAGSLSRQNGQILLLPTYAQAANLQLLLLRDAVKYEKEWGTLLSTEKVRGEVECPFTGDYGERLKCKIKQYTNYCVYWYQVGLNQIKEEGKSAEIWLKFNKFRREMTLAVLDIIAIFPTYDIENYPLQTKVELSRIIYTDPVGFNKEGLIYPWYSPYNNANFEQLELGTIRGPYLSTWLDYTDIYSSTFTTPQYYTLKVWSGNVNRMNLIGGTVERQDGSIVGTPQRVNVSNTDIFKVELTAGVHQFIIDYNSPNSLRSYGIINSKFFKANGSTQTYEGSVGSMHTQGIVVALPGELSEVPTANDYTHRLSDVINLTGGLSQHGSNYSIRSSIVAHGWTHKSLTRTNIVGANKITQIPAVKSYSLSGGLTVRHVSDHTGGDVVYFSQVGRVKILCTFTSTGYYKMRIRYASEYTATMTVNGIPVSLLSTTRVRSNLPYEAFQYAQVGPDHVFAVLTPETLEFNIYGGVNGLMIDKIEFIPSNITTLEYERERNLENAVNDLFTN

SEQ ID NO: 104 - protein, 347 aa, Bacillus sp.
MKKNYYKVLAIFPLACMLSTPMLAAPVSTFAAETQIEQGTPAIDMEQFKKDLKTANEYMPPEPQSDGSRKQYLPGHVTNPATVDVTPSLEKFSDVNATETKDITTADDTQEATYENVTDLNQTHITPSKTITNTDSFTYSNTEGAKLGIELDHTFTANVEIPGIGGAGGSTTEKVSTEFSYNHTSSNTTTHTEQITLPSQTLVAAPHGTTHYLGKVQRVEFSGKMEGSGYLTGTIDTEQYFTYPGEEGHWNGRANDPRNVKEKLDIYDVFKKALTNPAYRGLPSYLELDNVNKRVILKQPITSTFTGKLGFKADAKIEFTPSDPNKPKVQMSLADYQNPEKRAELLK

SEQ ID NO: 105 - protein, 317 aa, Artificial Sequence
  synthetic
MAETQIEQGTPAIDMEQFKKDLKTANEYMPPEPQSDGSRKQYLPGHVTNPATVDVTPSLEKFSDVNATETKDITTADDTQEATYENVTDLNQTHITPSKTITNTDSFTYSNTEGAKLGIELDHTFTANVEIPGIGGAGGSTTEKVSTEFSYNHTSSNTTTHTEQITLPSQTLVAAPHGTTHYLGKVQRVEFSGKMEGSGYLTGTIDTEQYFTYPGEEGHWNGRANDPRNVKEKLDIYDVFKKALTNPAYRGLPSYLELDNVNKRVILKQPITSTFTGKLGFKADAKIEFTPSDPNKPKVQMSLADYQNPEKRAELLK

SEQ ID NO: 106 - protein, 942 aa, Bacillus sp.
MEYKIGITVVYLILINKEIKMKTMNEKNTKLQGIIKERAADSLARASLNNYDIRNAYVTRTYDDLYRKIAALPDENPAPMIITKNLALTGLALGGLIAVPYIGIASSVFSGLAGYWFDYAMDESRASQVWTKVRAYSENLIEQKMSEDQFNRMVSQVEGLRATIRQYATFLQKNQKSEALAYCRNCITAFEQMIPSFKQVGIEVLSLPLYAQAAALHLLIYRDMIINGDNWGLSEADQNIYKRLFKEKLDAHRKYIKDTYLKGLEQRKTKAENLKNIFVPNAKDGLRPQGGILRAVTTVPDGISPEQESYGDTARWNYVNMYRTGMSQTVLAIASDFQHYDPQLYPRLYTGKDTTEIYTPISGMVPYRTKIEDIDNILEGQDNGSYKGNLLETIFGINDFEDYGQIGVTQQKLYNNDGISYLSWEGDVQNQTRYTKKSIFNNDAIAINQIYARHSGCPREIRMFYNSENRKPKGEGILTTTAPSRSVHATKADSLYFESITSDMFGYQLSSVRSIGFQKDAVVERGNLLPTDIMGMVFGFRYGNANYKHYLDLNKCYGVPAEMYSKAFNVGTIKELLNSCNSVKSSTTGTSYVEYEVYCPVNIGQYDLACKLAYKGNANINLPVTCNDKNMGSILVNQTTGDPEAIIGDYGDYKIFKLFSGLELKRGKNTIKIGLPAEMALASVEITPTRAIQQISGETQNFGSIGFFMDNQSSTEPDIIKAVAENGTQGISNQPTRWNLCVGGNIVYQFTENTPTNNIMNAVNNLPIEQKRGDYFWISKEEGIVREKIVNPKDNSFIEFYQTEDHNFAWTGHPESTLGSDPSQQLYIYVGGELQNSFSYDWKLKYIVAAFNKANLKGVGIRIKNTPATLHERLIDMINNLFLRLPGTKNKPDYNRIRVDLSSYDIEQCRNTVSILGYELSNKTVKTYLDLIKIAENLLAKK

SEQ ID NO: 107 - protein, 835 aa, Artificial Sequence
  synthetic
MFSGLAGYWFDYAMDESRASQVWTKVRAYSENLIEQKMSEDQFNRMVSQVEGLRATIRQYATFLQKNQKSEALAYCRNCITAFEQMIPSFKQVGIEVLSLPLYAQAAALHLLIYRDMIINGDNWGLSEADQNIYKRLFKEKLDAHRKYIKDTYLKGLEQRKTKAENLKNIFVPNAKDGLRPQGGILRAVTTVPDGISPEQESYGDTARWNYVNMYRTGMSQTVLAIASDFQHYDPQLYPRLYTGKDTTEIYTPISGMVPYRTKIEDIDNILEGQDNGSYKGNLLETIFGINDFEDYGQIGVTQQKLYNNDGISYLSWEGDVQNQTRYTKKSIFNNDAIAINQIYARHSGCPREIRMFYNSENRKPKGEGILTTTAPSRSVHATKADSLYFESITSDMFGYQLSSVRSIGFQKDAVVERGNLLPTDIMGMVFGFRYGNANYKHYLDLNKCYGVPAEMYSKAFNVGTIKELLNSCNSVKSSTTGTSYVEYEVYCPVNIGQYDLACKLAYKGNANINLPVTCNDKNMGSILVNQTTGDPEAIIGDYGDYKIFKLFSGLELKRGKNTIKIGLPAEMALASVEITPTRAIQQISGETQNFGSIGFFMDNQSSTEPDIIKAVAENGTQGISNQPTRWNLCVGGNIVYQFTENTPTNNIMNAVNNLPIEQKRGDYFWISKEEGIVREKIVNPKDNSFIEFYQTEDHNFAWTGHPESTLGSDPSQQLYIYVGGELQNSFSYDWKLKYIVAAFNKANLKGVGIRIKNTPATLHERLIDMINNLFLRLPGTKNKPDYNRIRVDLSSYDIEQCRNTVSILGYELSNKTVKTYLDLIKIAENLLAKK

SEQ ID NO: 108 - protein, 863 aa, Artificial Sequence
  synthetic
MIITKNLALTGLALGGLIAVPYIGIASSVFSGLAGYWFDYAMDESRASQVWTKVRAYSENLIEQKMSEDQFNRMVSQVEGLRATIRQYATFLQKNQKSEALAYCRNCITAFEQMIPSFKQVGIEVLSLPLYAQAAALHLLIYRDMIINGDNWGLSEADQNIYKRLFKEKLDAHRKYIKDTYLKGLEQRKTKAENLKNIFVPNAKDGLRPQGGILRAVTTVPDGISPEQESYGDTARWNYVNMYRTGMSQTVLAIASDFQHYDPQLYPRLYTGKDTTEIYTPISGMVPYRTKIEDIDNILEGQDNGSYKGNLLETIFGINDFEDYGQIGVTQQKLYNNDGISYLSWEGDVQNQTRYTKKSIFNNDAIAINQIYARHSGCPREIRMFYNSENRKPKGEGILTTTAPSRSVHATKADSLYFESITSDMFGYQLSSVRSIGFQKDAVVERGNLLPTDIMGMVFGFRYGNANYKHYLDLNKCYGVPAEMYSKAFNVGTIKELLNSCNSVKSSTTGTSYVEYEVYCPVNIGQYDLACKLAYKGNANINLPVTCNDKNMGSILVNQTTGDPEAIIGDYGDYKIFKLFSGLELKRGKNTIKIGLPAEMALASVEITPTRAIQQISGETQNFGSIGFFMDNQSSTEPDIIKAVAENGTQGISNQPTRWNLCVGGNIVYQFTENTPTNNIMNAVNNLPIEQKRGDYFWISKEEGIVREKIVNPKDNSFIEFYQTEDHNFAWTGHPESTLGSDPSQQLYIYVGGELQNSFSYDWKLKYIVAAFNKANLKGVGIRIKNTPATLHERLIDMINNLFLRLPGTKNKPDYNRIRVDLSSYDIEQCRNTVSILGYELSNKTVKTYLDLIKIAENLLAKK

SEQ ID NO: 109 - protein, 355 aa, Lysinibacillus sp.
VWQKKIEKEKISMKKRNYLVQKTLTIAAIASIGTTFALASPSLASANHISTSQEQGVLAENTPTSISINEQANAVGIKDVQSELNKIGKYYYTNEIAGTKYYSKGLPLIFNPAPDSVETELNFSITSNTLNNLNYDSTTINYVTVGQLDNTKTPLEQILTTISYSESVQETTSTATQNGFKVGGSGDLFFKVPLLVEGLKLNAEFNSSTTNTTTKSVTRTLTAPSQNIRVPSGKKYKAVAVLKQLNFWGDVSFTGEGVNPMTTIKGTAVYRAPNGHYWENHTWSKYTAQFWYELTNAQKNDLNGIEFNYFPSTGGVIVKAQGTGKFEGVMGSTLEVDILDVTNPANPILVESRPF

SEQ ID NO: 110 - protein, 310 aa, Artificial Sequence
  synthetic
MNHISTSQEQGVLAENTPTSISINEQANAVGIKDVQSELNKIGKYYYTNEIAGTKYYSKGLPLIFNPAPDSVETELNFSITSNTLNNLNYDSTTINYVTVGQLDNTKTPLEQILTTISYSESVQETTSTATQNGFKVGGSGDLFFKVPLLVEGLKLNAEFNSSTTNTTTKSVTRTLTAPSQNIRVPSGKKYKAVAVLKQLNFWGDVSFTGEGVNPMTTIKGTAVYRAPNGHYWENHTWSKYTAQFWYELTNAQKNDLNGIEFNYFPSTGGVIVKAQGTGKFEGVMGSTLEVDILDVTNPANPILVESRPF

SEQ ID NO: 111 - protein, 343 aa, Artificial Sequence
  synthetic
MKKRNYLVQKTLTIAAIASIGTTFALASPSLASANHISTSQEQGVLAENTPTSISINEQANAVGIKDVQSELNKIGKYYYTNEIAGTKYYSKGLPLIFNPAPDSVETELNFSITSNTLNNLNYDSTTINYVTVGQLDNTKTPLEQILTTISYSESVQETTSTATQNGFKVGGSGDLFFKVPLLVEGLKLNAEFNSSTTNTTTKSVTRTLTAPSQNIRVPSGKKYKAVAVLKQLNFWGDVSFTGEGVNPMTTIKGTAVYRAPNGHYWENHTWSKYTAQFWYELTNAQKNDLNGIEFNYFPSTGGVIVKAQGTGKFEGVMGSTLEVDILDVTNPANPILVESRPF

SEQ ID NO: 112 - protein, 286 aa, Bacillus sp.
MNKAGSVVNFKLPLERRIIMCANIVDIIDVFTRYANTWSEQRGGGNSRVSLILPGFEQLAFSSFTHNTKYHPPTEQMIPDAKLDSHTYTNEGTEPIHFNIELSGELQKLVELKVTEGVSEAGKRLLDIDLSSEQPPFLSTVHLPNGGDILSISHTQPWEVKHPYTIEPGYKLKATLMVKQKKTHRLFEVKRALSRYIGIYTSKPIGQHQLSLHHVSRIFKNHPIPNVEVNGRNVTATDKGTIQYQYGFEPYIHIQKQRINNPRVTEDFNIYNPQTSPPHVVYNQQL

SEQ ID NO: 113 - protein, 267 aa, Artificial Sequence
  synthetic
MCANIVDIIDVFTRYANTWSEQRGGGNSRVSLILPGFEQLAFSSFTHNTKYHPPTEQMIPDAKLDSHTYTNEGTEPIHFNIELSGELQKLVELKVTEGVSEAGKRLLDIDLSSEQPPFLSTVHLPNGGDILSISHTQPWEVKHPYTIEPGYKLKATLMVKQKKTHRLFEVKRALSRYIGIYTSKPIGQHQLSLHHVSRIFKNHPIPNVEVNGRNVTATDKGTIQYQYGFEPYIHIQKQRINNPRVTEDFNIYNPQTSPPHVVYNQQL

SEQ ID NO: 114 - protein, 302 aa, Unknown
  Unknown organism from environmental sample
MERRFKFMAIFDLDSYLLALARKAFQINITKVDTSSLRVTEAESYGFEIKSNIPQGTMFMGEAELTNNTNETQTLQSDSFTKTITDSITLSVTNGITTGVTVSVGGKVFGMGVETSMSFEVSTSTTKEQTSTDSVAYTVPSQTIVVPPQSKRYVYTTLQRSQLEGSVRLRADLSGNFKAIIHIPGLPAVPIYDGSMYEFIKTHQSLHPLPSGISLDHTDKSVHFEGVADYIYGTGTKFYVTVTDRPSSQGTQEHKPFDAKTGLGTYEIQLDGRKLGFDLNELKDKMEPEVFEKLKELQNEIV

SEQ ID NO: 115 - protein, 295 aa, Artificial Sequence
  synthetic
MAIFDLDSYLLALARKAFQINITKVDTSSLRVTEAESYGFEIKSNIPQGTMFMGEAELTNNTNETQTLQSDSFTKTITDSITLSVTNGITTGVTVSVGGKVFGMGVETSMSFEVSTSTTKEQTSTDSVAYTVPSQTIVVPPQSKRYVYTTLQRSQLEGSVRLRADLSGNFKAIIHIPGLPAVPIYDGSMYEFIKTHQSLHPLPSGISLDHTDKSVHFEGVADYIYGTGTKFYVTVTDRPSSQGTQEHKPFDAKTGLGTYEIQLDGRKLGFDLNELKDKMEPEVFEKLKELQNEIV

SEQ ID NO: 116 - protein, 398 aa, Bacillus sp.
MKSISKKVMAGLLVGATSLSIWAPISEAAAPENNRYYNIQLKSNQKKVWNVTRASNDNDRAILLWQGGSADNEKFAFFQLDGGAYAIVNKNSGKIVTFGDASWFGDRSILPGNETLQQQSWTGAAKQKWNLRDLGSNNYEIVNQANGKVPTYQWAGSLADNVEYLKMDNSNPSDADKVFTLFNGTVSFMGQNITVFNDTFSVPNLPATGNRPDAPNYTGGVDQQLPQTSNSVVVGASLVPCIMVNDNQASDYTKIHNSPYYTLVKEEYWDKTFSAVIPAGLTRNYSFKTGMTSVDQQKMTDTLSMKIGADFGLKFGDATASIKSEISRTLQTEISTTNTEASEETITSTVTSEAGKTTGYTEYQLATKYTLKRADGSIVSDPWVVKNNKITIARKNAQ

SEQ ID NO: 117 - protein, 369 aa, Artificial Sequence
  synthetic
MPENNRYYNIQLKSNQKKVWNVTRASNDNDRAILLWQGGSADNEKFAFFQLDGGAYAIVNKNSGKIVTFGDASWFGDRSILPGNETLQQQSWTGAAKQKWNLRDLGSNNYEIVNQANGKVPTYQWAGSLADNVEYLKMDNSNPSDADKVFTLFNGTVSFMGQNITVFNDTFSVPNLPATGNRPDAPNYTGGVDQQLPQTSNSVVVGASLVPCIMVNDNQASDYTKIHNSPYYTLVKEEYWDKTFSAVIPAGLTRNYSFKTGMTSVDQQKMTDTLSMKIGADFGLKFGDATASIKSEISRTLQTEISTTNTEASEETITSTVTSEAGKTTGYTEYQLATKYTLKRADGSIVSDPWVVKNNKITIARKNAQ

SEQ ID NO: 118 - protein, 766 aa, Unknown
  Unknown organism from environmental sample
LLIQFHPRYRLFGGKEMSKFTVYMLFIKKEEFIMATKEKNNANKCKFKGATPFTSVSNDSARYPFANEPTNALQNMNYREWLTTLDGDNNQGFINVEGRTTSSELLKIGGQVVGLILGKIPGIGSFLSFLTSAFWPTLPSNTSIWEALMAEVENLIDGKIQESTRKDALAKLEGLGVASKVYQDSLASWLENQNDMRARSVVKQQFVALELDFVQAIPSFRRPGDEVLLLPVYAQAANLHLVLLRDASLYGIDWGMTSSEVATFYNRQKEYTATYTDHCVNWYKKGLDKVWSAGNYLSHWQEFNDYRLEMTVAVLDVVSLFPNYDTHLYPIGTRGELTRTVYTSGINIDKKAGQLLKVRAEEQLIDPPNFFSWPKRLDFYTHGTFDPKWRFLAATKRNYVFANESYERFGSYEGYYYPEVGLQQSSFDLGYPPQDVYKINVRRFGNKQYIPTAITDMTFYKNDNTTYKYTANTPNTEPMIAEEFYLPGEDGKDVPTANNYSHRLQNIKGFALLNQVILHTFAWSHRSVDFKNTIYPDKITQLPMVKGTGLISGVSVVQGPGFTGGDILTRTSPGVIGDLNVTVNGSFSQRYLVRIRYASTTDLDFYVSRGGTTVNNYRFNKTMNKGTSLTYETFKFASFSTPFTFTQIQDQLRISVQNFSSGETVYVDRIEIIPVDVTYESENDLDMAKKAVNVLFMSTKDTVQLGVTDYQINQAINLVECLSNDLYPNEKRLLFHAVNEAKRLRGERNLLQDLNFQEVHGDLESE

SEQ ID NO: 119 - protein, 659 aa, Artificial Sequence
  synthetic
MSKFTVYMLFIKKEEFIMATKEKNNANKCKFKGATPFTSVSNDSARYPFANEPTNALQNMNYREWLTTLDGDNNQGFINVEGRTTSSELLKIGGQVVGLILGKIPGIGSFLSFLTSAFWPTLPSNTSIWEALMAEVENLIDGKIQESTRKDALAKLEGLGVASKVYQDSLASWLENQNDMRARSVVKQQFVALELDFVQAIPSFRRPGDEVLLLPVYAQAANLHLVLLRDASLYGIDWGMTSSEVATFYNRQKEYTATYTDHCVNWYKKGLDKVWSAGNYLSHWQEFNDYRLEMTVAVLDVVSLFPNYDTHLYPIGTRGELTRTVYTSGINIDKKAGQLLKVRAEEQLIDPPNFFSWPKRLDFYTHGTFDPKWRFLAATKRNYVFANESYERFGSYEGYYYPEVGLQQSSFDLGYPPQDVYKINVRRFGNKQYIPTAITDMTFYKNDNTTYKYTANTPNTEPMIAEEFYLPGEDGKDVPTANNYSHRLQNIKGFALLNQVILHTFAWSHRSVDFKNTIYPDKITQLPMVKGTGLISGVSVVQGPGFTGGDILTRTSPGVIGDLNVTVNGSFSQRYLVRIRYASTTDLDFYVSRGGTTVNNYRFNKTMNKGTSLTYETFKFASFSTPFTFTQIQDQLRISVQNFSSGETVYVDRIEIIPV

SEQ ID NO: 120 - protein, 1314 aa, Unknown
  Unknown organism from environmental sample
MIGGLWMNQKYHNDEYEVMDNGGMYIQPRYPYAKAPGSEYRQMNYKDWMVMCEPGDLLENGTPRAIRDAVLIGTGIVSTILGAFFPVAGVVGGILGILLPYLWPEKAGPPGTPQAQITWAQLMDAVEELVNEKIDMLVRDRAIESVQILQSRIRDYQQALCNLKLDPNNELYKAEVRDAFDDADDQAKAAIIQFRQEKYAVSLLADYAQAANIHLLLLRDVVQYGESWGFSPIRVQQYYSNTGIGNEGMLQLLAIYTDHCVRWYDTGLQQQYNTGDWNKFNSFRRDMTLMVLDVVALWPSYNPRYYSLPTKSQLTRTVYSRARIGGNSSGISYYEADFVTPPSLFTWWRRLDLDTIQPHPSFQRHFCGAQQQYQYTLDSTVYETSFKGNRGDRIESLLIPSQELKDDVWRILATSAEGDRAEYTNQFAFDLTKSGRQRLIAYDYPNPTLIPYSGFPCRPNTGEDCTPCDPNNICSTEITNITNPCDDVALYSHRVSRMGQRFSQPSMVGFTFGWTHISADTNNLIDRQKITQIPAVKGYRDPGVPDVIKGPGSTGGDLVSIPPTAYLQIRLTGPVAKGYQLRLRYACQNTGEIWINREVRSNDYWAADFSGTFSCPATYSGGSLQYNSFGYMTASETMLETFTSDWRMTFYNSGSTPLILDKIEFIPIEGSVEDFEADQALEKARKAVNALFTNDGKHTLHLNVTDYQIDQAAKLVECMADKMYPKEKMCLLDHVKCAKQLSRARNLLYYGDFESSDWSGENGWNTSNHVSLSSGNPIFKGRYLQLPGANQPEFSDQVFPTYAYQKIDESKLKPYTRYRVRGFIGNSKGLEVFATRYEKEVHKHMNVPNDIKPTNPCTGEYPLEQVSYPVVTSQVIPQNMSCGPCEDGSQMMMQQTSMVCADSHEWECHIDTGELDMNENLGIWVGFKIGTTDGLATLDNIEVIEEGPLTGEALTRMKKREHKWKQKGNEKRMKIEKAVQVAQRAMQGLFTHADQNQLQASITVQQIVDAEKWVQKIPYVYHPFLAGALPTVPGEAYDIFQQLSGAVATARALYEQRNVLRNGDFNAGLSNWQGTEGTQVQQIGNASVLVISDWSTNVSQQVCVHPEHGYVLRVTAKKEGSGEGYVKISDGTKENTETLKFIAGESATSSVPPMTPPRESYYEQDMTNYPAEESASQTYATGNPMNYQSESFGINPYGDEEMMNYPASYAGTDCGCGCRTKASMSYPPNNYEMNAYAGNTSGANPTGSSCGCGCHRKVYTSEDNMTTYVSESLSGYITKTVEIFPETNRVCIEIGETAGTFLVESVELIRMGCE

SEQ ID NO: 121 - protein, 662 aa, Artificial Sequence
  synthetic
MNQKYHNDEYEVMDNGGMYIQPRYPYAKAPGSEYRQMNYKDWMVMCEPGDLLENGTPRAIRDAVLIGTGIVSTILGAFFPVAGVVGGILGILLPYLWPEKAGPPGTPQAQITWAQLMDAVEELVNEKIDMLVRDRAIESVQILQSRIRDYQQALCNLKLDPNNELYKAEVRDAFDDADDQAKAAIIQFRQEKYAVSLLADYAQAANIHLLLLRDVVQYGESWGFSPIRVQQYYSNTGIGNEGMLQLLAIYTDHCVRWYDTGLQQQYNTGDWNKFNSFRRDMTLMVLDVVALWPSYNPRYYSLPTKSQLTRTVYSRARIGGNSSGISYYEADFVTPPSLFTWWRRLDLDTIQPHPSFQRHFCGAQQQYQYTLDSTVYETSFKGNRGDRIESLLIPSQELKDDVWRILATSAEGDRAEYTNQFAFDLTKSGRQRLIAYDYPNPTLIPYSGFPCRPNTGEDCTPCDPNNICSTEITNITNPCDDVALYSHRVSRMGQRFSQPSMVGFTFGWTHISADTNNLIDRQKITQIPAVKGYRDPGVPDVIKGPGSTGGDLVSIPPTAYLQIRLTGPVAKGYQLRLRYACQNTGEIWINREVRSNDYWAADFSGTFSCPATYSGGSLQYNSFGYMTASETMLETFTSDWRMTFYNSGSTPLILDKIEFIPI

SEQ ID NO: 122 - protein, 903 aa, Bacillus sp.
VLSMNSTSGNGLENEMDPMLSAYSNNRPNSIPGNDLNNGTNVMMDIYQNGDVSPVPNSYSVGDADTSSLPTKKENLVGLVGYYFKDSEFKELMFIQVGEKSNLMAHARRVNPNLEYIHSIRWMGNIKVSKSGDYKFFTSFDRDVILQIEGKTIMQRGGEPQSIPLEENKIYEIKLEYQRQVNSKVQLQLLYSIDDTMKMPIPDIQILSPNFSEKANLPAEKEHQVLLPNYNLFDSKSRRGSVTELDYDKDGIPDDWEINGYTFRKRQIVPWDDDYALEGRKKYISNPAKSHTAADPYTDFEKVAGLMPEATQLDARDPLVAAYPSVGVGMESFHFSKNDNVQQGASGTVSKSVTKINTTSETAELSMKFGFSKDVFAFDFSPKYSQSWSNSTSVQNTESSSWSSQIGINTAERAYLNANIRYYNDGNAPIYEVSPTTNFILQKSGQSIATITAGPNQIGHSLAPGDTYPAKGLGPISLDKANVTGTIKISVDAVTLDKIQNSGEVLQIETPQSSGQFGKLDETGMQIIGGDWNPYLTNVDTTSGALTLYLGPGKGSLERRVAAPNLADPDDETPIITLKEAIKKAFNATEIDGRLFYMAQDGSSIFISESAVNIITDAATKQEIDNQLNTLSDKKIYNVTWKRKMKITICAPTKYYDFESVDSGWSNSPQVGGAFTGQGRMDVGLIGSATTTQYLNLKKNTTYTARAYVKNSNSSGKNNVTFFVDNNNGAGSGVKVTGILEGSQGNQWQLVQCLFNTDENPEFFSKIGFLNNGTGYLNVDDVSVTEWRSYPGFQSYFRFDKWHVFEHATSQYRYTRVYFQKGIDTSVYNSVSKFKVRVNGKAPYTLDRPPLLADGRLSIYLEDGWYIGEGSLIEVWAITNTRKEIKILYRLTNLAESEIHYYA

SEQ ID NO: 123 - protein, 900 aa, Artificial Sequence
  synthetic
MNSTSGNGLENEMDPMLSAYSNNRPNSIPGNDLNNGTNVMMDIYQNGDVSPVPNSYSVGDADTSSLPTKKENLVGLVGYYFKDSEFKELMFIQVGEKSNLMAHARRVNPNLEYIHSIRWMGNIKVSKSGDYKFFTSFDRDVILQIEGKTIMQRGGEPQSIPLEENKIYEIKLEYQRQVNSKVQLQLLYSIDDTMKMPIPDIQILSPNFSEKANLPAEKEHQVLLPNYNLFDSKSRRGSVTELDYDKDGIPDDWEINGYTFRKRQIVPWDDDYALEGRKKYISNPAKSHTAADPYTDFEKVAGLMPEATQLDARDPLVAAYPSVGVGMESFHFSKNDNVQQGASGTVSKSVTKINTTSETAELSMKFGFSKDVFAFDFSPKYSQSWSNSTSVQNTESSSWSSQIGINTAERAYLNANIRYYNDGNAPIYEVSPTTNFILQKSGQSIATITAGPNQIGHSLAPGDTYPAKGLGPISLDKANVTGTIKISVDAVTLDKIQNSGEVLQIETPQSSGQFGKLDETGMQIIGGDWNPYLTNVDTTSGALTLYLGPGKGSLERRVAAPNLADPDDETPIITLKEAIKKAFNATEIDGRLFYMAQDGSSIFISESAVNIITDAATKQEIDNQLNTLSDKKIYNVTWKRKMKITICAPTKYYDFESVDSGWSNSPQVGGAFTGQGRMDVGLIGSATTTQYLNLKKNTTYTARAYVKNSNSSGKNNVTFFVDNNNGAGSGVKVTGILEGSQGNQWQLVQCLFNTDENPEFFSKIGFLNNGTGYLNVDDVSVTEWRSYPGFQSYFRFDKWHVFEHATSQYRYTRVYFQKGIDTSVYNSVSKFKVRVNGKAPYTLDRPPLLADGRLSIYLEDGWYIGEGSLIEVWAITNTRKEIKILYRLTNLAESEIHYYA

SEQ ID NO: 124 - protein, 501 aa, Bacillus sp.
MLDIRLSKYLKTKPKGDLFMKNTKLIAATALSVSLVSLLPMTSFAAEDNIKTVINNNSNAIYKDFIDITELFTLSGSAQYNPVTKITTLTEDKYSQAGAMSGNSAINIKHDFTLEANVFLGNNQNGADGIAIGFHSGKIGSIGDMGGGLGVLGLKGGIAFEMDTYTQAPIDNDPNFNHNKMKTSHAGFVSTDANANYLTALAPMQKINDPNKEWRTVKLHWNARAKLLTASLEGKTWELKNPNFDSNQKYTFVIGAATGSAKNEHKIKINKFNAYFTKPKIEANDVEVKQGTNFDPLNYNDIQLKAIDETDGDLTDKITVEKNNVDTSTPGHYQVTYKVTNSYGEFDLKTINVTVPVIDDTWENGEANGWKFYAGEDITLLKDSEQALKGDYVFYADKHVGIYKTIKLESNATYRATVYVKPEKEDISQFHYVKLSLKDDPSGKESHEIFNKNLGSIDPGEKGYRKIVAEFTANENETTPLLVLENYQSGYIGSIKISKVK

SEQ ID NO: 125 - protein, 457 aa, Artificial Sequence
  synthetic
MAEDNIKTVINNNSNAIYKDFIDITELFTLSGSAQYNPVTKITTLTEDKYSQAGAMSGNSAINIKHDFTLEANVFLGNNQNGADGIAIGFHSGKIGSIGDMGGGLGVLGLKGGIAFEMDTYTQAPIDNDPNFNHNKMKTSHAGFVSTDANANYLTALAPMQKINDPNKEWRTVKLHWNARAKLLTASLEGKTWELKNPNFDSNQKYTFVIGAATGSAKNEHKIKINKFNAYFTKPKIEANDVEVKQGTNFDPLNYNDIQLKAIDETDGDLTDKITVEKNNVDTSTPGHYQVTYKVTNSYGEFDLKTINVTVPVIDDTWENGEANGWKFYAGEDITLLKDSEQALKGDYVFYADKHVGIYKTIKLESNATYRATVYVKPEKEDISQFHYVKLSLKDDPSGKESHEIFNKNLGSIDPGEKGYRKIVAEFTANENETTPLLVLENYQSGYIGSIKISKVK

SEQ ID NO: 126 - protein, 482 aa, Artificial Sequence
  synthetic
MKNTKLIAATALSVSLVSLLPMTSFAAEDNIKTVINNNSNAIYKDFIDITELFTLSGSAQYNPVTKITTLTEDKYSQAGAMSGNSAINIKHDFTLEANVFLGNNQNGADGIAIGFHSGKIGSIGDMGGGLGVLGLKGGIAFEMDTYTQAPIDNDPNFNHNKMKTSHAGFVSTDANANYLTALAPMQKINDPNKEWRTVKLHWNARAKLLTASLEGKTWELKNPNFDSNQKYTFVIGAATGSAKNEHKIKINKFNAYFTKPKIEANDVEVKQGTNFDPLNYNDIQLKAIDETDGDLTDKITVEKNNVDTSTPGHYQVTYKVTNSYGEFDLKTINVTVPVIDDTWENGEANGWKFYAGEDITLLKDSEQALKGDYVFYADKHVGIYKTIKLESNATYRATVYVKPEKEDISQFHYVKLSLKDDPSGKESHEIFNKNLGSIDPGEKGYRKIVAEFTANENETTPLLVLENYQSGYIGSIKISKVK

SEQ ID NO: 127 - protein, 393 aa, Unknown
  Unknown organism from environmental sample
VVHSTTTTNEKEFSSMLRKNRIIFSGMTALTIVGSGLTVSIPTAFANTQENITPLQSVQGQEFTDENGQVIPPGTFANISPYWLIGDSNNELYNFYNQVKQRIVDKKNKEQNMLKLDEYLNDLWFVGAVSQLYETPNDHNKRLEASNLVRWYKNNNAVKPNFEILESKLDNVEPILDITEPIGYFATDSEYTNNSPHMGEYLIPGWSKSTSTTYTTTTTQGFSIGANGDIKISLPFLDKLGLTGTYNFSKSDSVTTTDSTTLTIPVQMIQVSPFSHSKTSFYFQTHQYRAKFDVTAKFKAEVGSDAEYTRKRSAFYLLAKYNDYLPKGILVENGGKLTLVGKGEISVPNHINGFKLVKETKETLLSGKEGKTIKESYTKNPNTNEFNPEIKKT

SEQ ID NO: 128 - protein, 348 aa, Artificial Sequence
  synthetic
MNTQENITPLQSVQGQEFTDENGQVIPPGTFANISPYWLIGDSNNELYNFYNQVKQRIVDKKNKEQNMLKLDEYLNDLWFVGAVSQLYETPNDHNKRLEASNLVRWYKNNNAVKPNFEILESKLDNVEPILDITEPIGYFATDSEYTNNSPHMGEYLIPGWSKSTSTTYTTTTTQGFSIGANGDIKISLPFLDKLGLTGTYNFSKSDSVTTTDSTTLTIPVQMIQVSPFSHSKTSFYFQTHQYRAKFDVTAKFKAEVGSDAEYTRKRSAFYLLAKYNDYLPKGILVENGGKLTLVGKGEISVPNHINGFKLVKETKETLLSGKEGKTIKESYTKNPNTNEFNPEIKKT

SEQ ID NO: 129 - protein, 586 aa, Bacillus sp.
MRHVEELVNTSIEVRARQQALDELTGLSNIVASYNRTLADWKLAQNDSQAKERVRDAFRTVNTFFEQRMPLFSSRNYEVPLLTVYALAANMHLLLLRDSSIFGIGWGFSQKEVNDNYCDQLRLANQYANHCTTWFNTGLHRLRGTNASSWIRYNRFRREMTLTVLDICSLFSKYDYYQYPKEVKSELTREIYTDPVGVSTSTVPGLIPNWFNHAPSFNELELALIRSPRTLTWLNKITISTGRLNGWSTSQNYWQGHRLEFSETSAGNNQPSPTYGTFNTSVAQHRDFNVLNRDVYTMDSYAVSQVFGTSTATLFGVSDNVFQYQDLNSNFPGTLNYTNPPSWGGLHIYSELPALPTTPGVEPGRPTANNYSHRLTYLTASRAGTAGHVLCCGWTSSTVDRNNRIDPNKITQIPAVKGYNLGSATVVVRGPGHTGGDLVKFDYFEGGLTINCYFPQPLNYRMRIRYSAPNNSAMYLNSSHVASVYIPFPRTNIIDNVLVDPMVYGAFQTVEVPARFRANNVGNATFTFRLQYSQNPIYIDKIEFIPDGTPIKKCTCKCVGIYCTLECTESRSLTTEKEIVNNLFIN

SEQ ID NO: 130 - protein, 547 aa, Artificial Sequence
  synthetic
MRHVEELVNTSIEVRARQQALDELTGLSNIVASYNRTLADWKLAQNDSQAKERVRDAFRTVNTFFEQRMPLFSSRNYEVPLLTVYALAANMHLLLLRDSSIFGIGWGFSQKEVNDNYCDQLRLANQYANHCTTWFNTGLHRLRGTNASSWIRYNRFRREMTLTVLDICSLFSKYDYYQYPKEVKSELTREIYTDPVGVSTSTVPGLIPNWFNHAPSFNELELALIRSPRTLTWLNKITISTGRLNGWSTSQNYWQGHRLEFSETSAGNNQPSPTYGTFNTSVAQHRDFNVLNRDVYTMDSYAVSQVFGTSTATLFGVSDNVFQYQDLNSNFPGTLNYTNPPSWGGLHIYSELPALPTTPGVEPGRPTANNYSHRLTYLTASRAGTAGHVLCCGWTSSTVDRNNRIDPNKITQIPAVKGYNLGSATVVVRGPGHTGGDLVKFDYFEGGLTINCYFPQPLNYRMRIRYSAPNNSAMYLNSSHVASVYIPFPRTNIIDNVLVDPMVYGAFQTVEVPARFRANNVGNATFTFRLQYSQNPIYIDKIEFIPD

SEQ ID NO: 131 - protein, 539 aa, Bacillus sp.
VNHMYTNNMKNTLKLETTDYEIDQAAISIECMSDEQNPQEKKMLWDEVKHAKQLSQSRNLLYNGDFEDTSNGWKTSYTIEIRENSPIFKGHYLHMFGARDINGTLFPTYIYQKIDESKLKPYTRYRVRGFVESSKDLTLVVTRYGKDIDAHMDVPNDLSYMQPNPSCGDYRCESSPQYVSQGYYTPTDVYAPDRYACPSSSDKKHVMCHDRHPFDFHIDTGEVDTNTNVGIDVLFKISNPDGYATLGNLEVIEEGPLTDEALAHVKQKEKKWKQHMEKKRWETQQAYDPAKQAIDALFTNEQELHYHITLDHIQNADQLLQEIPYVYHDWLPNAPGMNYDLFNNLKVRIEQARYLYDARNVITNGDFTQGLTGWHATGKATVQQMNGASVLVLSNWSAGVSQNLHAQEHHGYVLRVIAKKEGPGKGYVTMMDCNGNQETLKFTSCEEGYMTKTVEVFPESDRVRIEIGETEGTFYIDSIELICMKGYANNNNSHSGNMYEQSYNGNYNQNMSDVYHQGYTNNYNQGHNSGCTCSQGYKR

SEQ ID NO: 132 - protein, 336 aa, Bacillus sp.
MKKSSKKKKQILSLAMIGAIGTSFALTSPTLASAAQVNPVQAMTQAQESGSVSDWKDPFNQAFSTLQQNNASYYWFGEYYYDKNESITDLRLNNVYQSSVEADGSPTITNSNSLFVGKTTLTNNTDQEQELTTSQFSKTFETSVTSSTTHGFNLGVTATSTFGIPLIGETSVQLSTEYNFSNTNENRKAESYTYTATPQTIKVPAHSAVEVIVNLNTAKIKGNVKLLSLVDGVYDSKSNIRSSVSSTSLATLAARALQYDKNLNLSVNGVESQNKVYVVGRGNYSAEYGTEFAVTVRPVAKPSTFAAKSRSMVAENSKATNEGYTYTVKPEVKKEQ

SEQ ID NO: 133 - protein, 303 aa, Artificial Sequence
  synthetic
MAQVNPVQAMTQAQESGSVSDWKDPFNQAFSTLQQNNASYYWFGEYYYDKNESITDLRLNNVYQSSVEADGSPTITNSNSLFVGKTTLTNNTDQEQELTTSQFSKTFETSVTSSTTHGFNLGVTATSTFGIPLIGETSVQLSTEYNFSNTNENRKAESYTYTATPQTIKVPAHSAVEVIVNLNTAKIKGNVKLLSLVDGVYDSKSNIRSSVSSTSLATLAARALQYDKNLNLSVNGVESQNKVYVVGRGNYSAEYGTEFAVTVRPVAKPSTFAAKSRSMVAENSKATNEGYTYTVKPEVKKEQ

SEQ ID NO: 134 - protein, 675 aa, Pseudomonas sp.
MRGQQLQHRDRVLGRRGPAALLGQPGDRSRHPLRPRAGHHWLLADAEPARRLHEAGVLDLGRHALRADLPCQLCTLPGFQGRCLERAQLCELTGKASANSSKAWTSSMPPARKSSAAPPANTAACRVALALGPAITSRLHLNPIHIYTLNAVIPKISLFSTPPSNTIKNLSMLIPCSPDELLYLPITHKEIIMENIDLPQGLVNFSTQHLQLIRFKAGLHETVLPGVEAIGLGYNPFISYASVNSGAVQLFDWATAKKREVPFKAGYFVPEIVDVQQNDSATYTNVSGNTISEYQRSLATSVAIEGRYNFFSGSLSTDFDSNSLRNAENEFTRIQQSINLWSLRLPSVKSLRELMLPHMRQQLDELNVNDPKAISRYFDSVGSHFLTGIVMGGRAILASSTNKLRVKRDYSVSVVAKASYEGLTGQLSAEAKAKYGESISSFTQYSNTHQEVRGGDGAKAHGVFSGKKEDFQAWVDSVSASPDFVDFVPTIPMQEIWTLCSSEAQAEAMRKHYDDVWAPAQSEKYRVKANYIDQLVVITGGSSTIEPPVGYSKIEYDLNAGAGGDFIYLCYHEQNWQADRPKDAVTDIRIIFNKEPTPPGYTKLPQDLNKGAGGDDVFLCYKTEAYNTDTAINKVTVIGGNNADINAPYGYLKVPGDLNRGAGGNFIYACTFVGK

SEQ ID NO: 135 - protein, 483 aa, Artificial Sequence
  synthetic
MENIDLPQGLVNFSTQHLQLIRFKAGLHETVLPGVEAIGLGYNPFISYASVNSGAVQLFDWATAKKREVPFKAGYFVPEIVDVQQNDSATYTNVSGNTISEYQRSLATSVAIEGRYNFFSGSLSTDFDSNSLRNAENEFTRIQQSINLWSLRLPSVKSLRELMLPHMRQQLDELNVNDPKAISRYFDSVGSHFLTGIVMGGRAILASSTNKLRVKRDYSVSVVAKASYEGLTGQLSAEAKAKYGESISSFTQYSNTHQEVRGGDGAKAHGVFSGKKEDFQAWVDSVSASPDFVDFVPTIPMQEIWTLCSSEAQAEAMRKHYDDVWAPAQSEKYRVKANYIDQLVVITGGSSTIEPPVGYSKIEYDLNAGAGGDFIYLCYHEQNWQADRPKDAVTDIRIIFNKEPTPPGYTKLPQDLNKGAGGDDVFLCYKTEAYNTDTAINKVTVIGGNNADINAPYGYLKVPGDLNRGAGGNFIYACTFVGK

SEQ ID NO: 136 - protein, 303 aa, Bacillus sp.
MAIVNFNQLIVDYAQSLASSNQGVTFTGQYGYIEVGDPSGAAPFTVSNAVANPDTTTYNFAPGSSVFSSSQVVQNNSDVPVTKELTVGQSFENSNSTSTTNGLTTNYAITSTSTFSVQYGVKEGNTISEALECTFDQTFDFSTTDSNTQTESQNWNETTSFTVPPYSQMNVVYTVLGGNFIINTSLTCELQGCIWFTLNYPGTGDVKEIVDIYSVIENAGLNGTYPPPGDTGTPFSIAEPGGIAYFGGTGEFSGTQGVQSIITATSSPLPGYSGQTTTSTTPLTSINSDGTVTPSSSPIPIYS

SEQ ID NO: 137 - protein, 326 aa, Bacillus sp.
MKKKTITALALSIPVFISSGNIASAQINPPANMSIGNINSQKLLNYQEQRKQVVNIETAIREAIPGYVKYIHGFGESVNPGVIINDIKLIDVEEKYKDPEYPLQTKLINRGPEKLVQSIEEDIYNDHPSAELTKSHTFQHAVSNASTLTKSITHSHKGGVKFTYKAKVNLIGADTEVGGEVSYEYTNSNQEGTSDSKTFSKTFSSTASAKLQPMSRAKLVSNVYTSPATYELKSRSFFTGSVQFSYILASNPNKLETKTVSLYELFTRTDYQTRDSIAEKYHMWSQTFWKPENGEAVQALLFEGTSILNIDETYRTETRLKDIKSM

SEQ ID NO: 138 - protein, 302 aa, Artificial Sequence
  synthetic
MQINPPANMSIGNINSQKLLNYQEQRKQVVNIETAIREAIPGYVKYIHGFGESVNPGVIINDIKLIDVEEKYKDPEYPLQTKLINRGPEKLVQSIEEDIYNDHPSAELTKSHTFQHAVSNASTLTKSITHSHKGGVKFTYKAKVNLIGADTEVGGEVSYEYTNSNQEGTSDSKTFSKTFSSTASAKLQPMSRAKLVSNVYTSPATYELKSRSFFTGSVQFSYILASNPNKLETKTVSLYELFTRTDYQTRDSIAEKYHMWSQTFWKPENGEAVQALLFEGTSILNIDETYRTETRLKDIKSM

SEQ ID NO: 139 - protein, 1282 aa, Unknown
  Unknown organism from environmental sample
METNSMLPQDPSSSDLTMSIPYNVLSASAYNIPMSNNCMSIQDIIALFQKIYTEIGDIPYGSIKQVWDSAQQENWLDLIHGVLGFATFSLPEIVGAVPIVAKLIDFIYPKLFGATEPNPPSVWDQVSARVEALVGKKINASERATLLGKFKEIDKFSEYLRKSIDVSICQGRESGFFSDIEYPCVNSCGLAYGTNPDDYIPPYGVEVKKEAVRSNFIALNTFLIGLLPEFNKATASSSSGSARVDYINLSLPLFTMAASLHLILIQSTIDSGLKWGFTQAQVNDYQADLRTRIKTYTEIVRTTFHEGLQLIQGNYTNQQNYIVNMTTQCFDLLNVWPAYDRFDYDNPGKKDIQQTRIIYSPLVNTKPSNNSSNSEYPNTNTLDYIGELQQLSFTTWNKMLESYFNGIENTLLLPDGSVVNYPYGGATHANSGNPNDPTKWAGSVTISRENPLVGMRLWNGQYNAIKTSQADFTFADGSQQKIGQAVSPYYSETAIAPPMQKIEYIYPFNQGDPLQGFSAGFVPADLFPENIVGTVDIGTLEPMISAIPVDKASSTRGFRKVLERINGTNALQSTGGQISSASIVINVVTSGEYKIRVRLSSPTNTNNLTLVKDGEQLACIPLPHTIPTTQKGLQGDFGVYMLVDVVNSTRLISGKSTFDISIDGANVCIDRIEFIPLNLGGGLVTPNFSVNYQVSQQVPEYPDMLAQTVWSSTEGLVNNLDVTGNINNKRNFSGSVSIPSGKMSVQCILKNNVVFEKIIEGSEDTNSFYTPFSIQQSIPNGFDSIVVRSIYLHRADGHISSNDSPTFSILKDLDEVTGVVQALFLSPGAAVLAASATDYMIDQAFLKVQALSDNIFATEKVQLRQLVNQAKQLSQANNLIIGSTFTPPSNWNLAENAVILSNSDAFASSYVLLQPSKYPTTRPSYAYQKIEESKLKANTRYAVTGFIRAAESLEINISRYGAEVLETLNVPYTDLLPLTPGKQTNCCVAPICKPCDNELNDSHVFTYHIDVGALQLDADLGIELAFKLVSTTGFAQLSNVEVKAERPLTEAEKRKVNQREKMWKQVYIQQQQLVASQIQQMQKQLAALYAGPDPVELKPTVQYCTITNIMLPNMPAVYNCYIPQIPGINYNAFAALVIAKAKVLSLYPQNFIINGYFDKGLQNWEIKGNARVQQTENEQGILHLTSWDSIASQTIILPTSQEEVVYRLRVTAKGLGSIQLRDTEETEFLSFTVANDRWQTKELTVYADKDNNIKQLQIQGNGTEFVIHSVEISVSPDPLTGA

SEQ ID NO: 140 - protein, 677 aa, Artificial Sequence
  synthetic
METNSMLPQDPSSSDLTMSIPYNVLSASAYNIPMSNNCMSIQDIIALFQKIYTEIGDIPYGSIKQVWDSAQQENWLDLIHGVLGFATFSLPEIVGAVPIVAKLIDFIYPKLFGATEPNPPSVWDQVSARVEALVGKKINASERATLLGKFKEIDKFSEYLRKSIDVSICQGRESGFFSDIEYPCVNSCGLAYGTNPDDYIPPYGVEVKKEAVRSNFIALNTFLIGLLPEFNKATASSSSGSARVDYINLSLPLFTMAASLHLILIQSTIDSGLKWGFTQAQVNDYQADLRTRIKTYTEIVRTTFHEGLQLIQGNYTNQQNYIVNMTTQCFDLLNVWPAYDRFDYDNPGKKDIQQTRIIYSPLVNTKPSNNSSNSEYPNTNTLDYIGELQQLSFTTWNKMLESYFNGIENTLLLPDGSVVNYPYGGATHANSGNPNDPTKWAGSVTISRENPLVGMRLWNGQYNAIKTSQADFTFADGSQQKIGQAVSPYYSETAIAPPMQKIEYIYPFNQGDPLQGFSAGFVPADLFPENIVGTVDIGTLEPMISAIPVDKASSTRGFRKVLERINGTNALQSTGGQISSASIVINVVTSGEYKIRVRLSSPTNTNNLTLVKDGEQLACIPLPHTIPTTQKGLQGDFGVYMLVDVVNSTRLISGKSTFDISIDGANVCIDRIEFIPL

SEQ ID NO: 141 - protein, 299 aa, Unknown
  Unknown organism from environmental sample
LRFMAIFDFDAYLLALANKVFPLPWISRVDTSNLSVKNAESYGFEIKNSKPQGTMFIGESVLTNNTNETQTIKSDSFTKTITDSITLSVTNGIKTGIDISIGGKVFGMGVETSMSFEVSTSTTREQTSTESVAYTVPSQDVVVPPQSKRYVYTSLQRSQLEGIIRLRADLSGLFVGYIKWDSGEESPIVGGDIYQYINTNQLLHPLPSGISLKHQDKAIHFEGVAEYIYGTGTKFYVTITDTPSSQGTQEHKPLDANTGLGTYPISLDGKRLDLTLNDLKEHMEPKDFEKLKELQNEIV

SEQ ID NO: 142 - protein, 296 aa, Artificial Sequence
  synthetic
MAIFDFDAYLLALANKVFPLPWISRVDTSNLSVKNAESYGFEIKNSKPQGTMFIGESVLTNNTNETQTIKSDSFTKTITDSITLSVTNGIKTGIDISIGGKVFGMGVETSMSFEVSTSTTREQTSTESVAYTVPSQDVVVPPQSKRYVYTSLQRSQLEGIIRLRADLSGLFVGYIKWDSGEESPIVGGDIYQYINTNQLLHPLPSGISLKHQDKAIHFEGVAEYIYGTGTKFYVTITDTPSSQGTQEHKPLDANTGLGTYPISLDGKRLDLTLNDLKEHMEPKDFEKLKELQNEIV

SEQ ID NO: 143 - protein, 234 aa, Unknown
  Unknown organism from environmental sample
VSSVLLNNNNCIQNVHIPSYQRITLTVPSSSEGNLKNIFQVEPQFISQALAASNAFQGAIDSNLNFNYERAYQIGVNMPGRDYDPSMWGINQPVIQETLQVSSMINQLKSSLNKFLYFVDIANETFWNEVEAAIINTFTNLHTQQNSAWIFYHSSTSTSTSYYYNIMFALQDPNYRTMIVIPIAFDITVRLEKEKVLFITLKDRAEYRVTLKSIWVRLILQKNYDKEIVNIFNP

SEQ ID NO: 144 - protein, 234 aa, Artificial Sequence
  synthetic
MSSVLLNNNNCIQNVHIPSYQRITLTVPSSSEGNLKNIFQVEPQFISQALAASNAFQGAIDSNLNFNYERAYQIGVNMPGRDYDPSMWGINQPVIQETLQVSSMINQLKSSLNKFLYFVDIANETFWNEVEAAIINTFTNLHTQQNSAWIFYHSSTSTSTSYYYNIMFALQDPNYRTMIVIPIAFDITVRLEKEKVLFITLKDRAEYRVTLKSIWVRLILQKNYDKEIVNIFNP

SEQ ID NO: 145 - protein, 324 aa, Bacillus sp.
MKKKVLTAVVLSIPMLISSGNITSAETNILSNVNQNSPELQELSNYQNQQKQVVNIETAAREAIPGYARFIHGQGSNVSVIINNVQLIDVEEKYIDPDYSVQTKLLSKGPEKLVQSIEEDIYNDHPSAELTKSHTFQHGISNTSTLTKSITHSHKAGVKFTYKAKVDFLVAGSELGGEVAYEYTNSNQNGTSDSRTFSKTFSSTASAKLPPKSKGKLVSNVYTSPALYEIKSRSLFTGSVQFSYVLANDPDTLHTENVSLFELLRRTDEDSRDKIMGKYNMWSQTYWDPETGEGIKALAFEGVSILNIDDKYRTETRLVDIKEI

SEQ ID NO: 146 - protein, 300 aa, Artificial Sequence
  synthetic
METNILSNVNQNSPELQELSNYQNQQKQVVNIETAAREAIPGYARFIHGQGSNVSVIINNVQLIDVEEKYIDPDYSVQTKLLSKGPEKLVQSIEEDIYNDHPSAELTKSHTFQHGISNTSTLTKSITHSHKAGVKFTYKAKVDFLVAGSELGGEVAYEYTNSNQNGTSDSRTFSKTFSSTASAKLPPKSKGKLVSNVYTSPALYEIKSRSLFTGSVQFSYVLANDPDTLHTENVSLFELLRRTDEDSRDKIMGKYNMWSQTYWDPETGEGIKALAFEGVSILNIDDKYRTETRLVDIKEI

SEQ ID NO: 147 - protein, 366 aa, Bacillus sp.
MSKKKNRNKALIVTAAACSIGFSGLGSATSAFAEAPKVQYTDYHDINNQNMNDQDRNQFNNFKRYFDYGSTISTIRDIHAVGTPNIVDAGSETLDNTAGYSSQKLNTPSTTIKTTDTLTTTHAIENAAEFGLTLAVESKENIGIVEETQKFTASIKDTLKTTDSKTTTHSDEKTYVIPSQSIEVPAGKKYKIEYVYKQTALEGVMDQVKEIREQRNENGKLNFPDVAVGRDSHEQATPNTGVGISFSNSKGESANLTNAAYDPVLNATPYQMFNQLTNMTKQAKQWGITNPICAIVDGSANITALHADALLNNIYLDHSLGKAYMVEESIPFKAATGHEFTLKVYDVTNGDKALVAEKPVQNAVKK

SEQ ID NO: 148 - protein, 334 aa, Artificial Sequence
  synthetic
MEAPKVQYTDYHDINNQNMNDQDRNQFNNFKRYFDYGSTISTIRDIHAVGTPNIVDAGSETLDNTAGYSSQKLNTPSTTIKTTDTLTTTHAIENAAEFGLTLAVESKENIGIVEETQKFTASIKDTLKTTDSKTTTHSDEKTYVIPSQSIEVPAGKKYKIEYVYKQTALEGVMDQVKEIREQRNENGKLNFPDVAVGRDSHEQATPNTGVGISFSNSKGESANLTNAAYDPVLNATPYQMFNQLTNMTKQAKQWGITNPICAIVDGSANITALHADALLNNIYLDHSLGKAYMVEESIPFKAATGHEFTLKVYDVTNGDKALVAEKPVQNAVKK

SEQ ID NO: 149 - protein, 965 aa, Bacillus sp.
MKLKSIFKCLTITAILSQIAVSPVTSYAESSNEKKADNQTNTEEKSNIQGLLGYHFKDAQFHELASIKIGVQSNKLIDKTKVMKNNQTIESIRWMGRVKPSQTGEYTLSTSSDQHVILQINGETVINQSKMKKTLKLEKGKVYELKIEYQNTKDNVSNLQLFWSIDSKEKEPIPQKNILLPNFSEKEKLPDDKKDMLLLPNFNLFNNKSVSTKLKDTDKDGIPDEWEEQGYTFKDQDIVKWDTSYLAQGYKKYVSNPYKARTVADPYTDFEKVSDHMPAATKDEARDPLVAAYPAVGVGMENLLFSKNENVTEGDSGTKSKSVTDTNTTTNAVEVGGEVGGEFNPFKFASFKVSTKYSHSWTNSTAIQNSESESWSKQIGINTAESAFLNANVRYYNAGTAPIYDLRPTSNFVFQNSGTSVTTITAGPNQIGNSLGPNDTYPKREQAPISLDKANESGTAKIAINAEQLDALQDGKETLNLETTQNKGQYGILDDTGNLVTDASKQWDPIRTNIDTVSGSLTMYYSTSKESLERRVAAKNENDPEDKTPEITIGEAIKKAFNAKEKDGRLYYTDYTGKDVCLDESAVNLIGDEKTQKEIGKQLDQMQDKKIYNAKWKRDMNITLHIPTTYYDFEPNSVEWTNTVKEDGGYTGKQRGSIKPGISGYTANELELKPYTNYTARAYVKTASPTGKSNIVFYADIDNSAKGKGARQNVTIEGDKWQLVEFSFNTMGNPEYFKRLGIENNGNSNLHIDDVSVTEWKQGENIQKLHVFEKWNPKYDGFGSVSSITFSKVPNTKVRYQWSGVNPATGKESWSEIRPANDTDEFGNRIVPIGLFFPGSKLYAVDQHNDNLKVEIAQYIPLYFEHHVDISWNKVKENKKEYINGITFKKVTDRKVRYKVVVDYNQDKGIKPAYEIDSEGNRYVNFLEYNNGKGIPADVNSIAVYVVDEKDDNIFDKVAEYHPWG

SEQ ID NO: 150 - protein, 938 aa, Artificial Sequence
  synthetic
MESSNEKKADNQTNTEEKSNIQGLLGYHFKDAQFHELASIKIGVQSNKLIDKTKVMKNNQTIESIRWMGRVKPSQTGEYTLSTSSDQHVILQINGETVINQSKMKKTLKLEKGKVYELKIEYQNTKDNVSNLQLFWSIDSKEKEPIPQKNILLPNFSEKEKLPDDKKDMLLLPNFNLFNNKSVSTKLKDTDKDGIPDEWEEQGYTFKDQDIVKWDTSYLAQGYKKYVSNPYKARTVADPYTDFEKVSDHMPAATKDEARDPLVAAYPAVGVGMENLLFSKNENVTEGDSGTKSKSVTDTNTTTNAVEVGGEVGGEFNPFKFASFKVSTKYSHSWTNSTAIQNSESESWSKQIGINTAESAFLNANVRYYNAGTAPIYDLRPTSNFVFQNSGTSVTTITAGPNQIGNSLGPNDTYPKREQAPISLDKANESGTAKIAINAEQLDALQDGKETLNLETTQNKGQYGILDDTGNLVTDASKQWDPIRTNIDTVSGSLTMYYSTSKESLERRVAAKNENDPEDKTPEITIGEAIKKAFNAKEKDGRLYYTDYTGKDVCLDESAVNLIGDEKTQKEIGKQLDQMQDKKIYNAKWKRDMNITLHIPTTYYDFEPNSVEWTNTVKEDGGYTGKQRGSIKPGISGYTANELELKPYTNYTARAYVKTASPTGKSNIVFYADIDNSAKGKGARQNVTIEGDKWQLVEFSFNTMGNPEYFKRLGIENNGNSNLHIDDVSVTEWKQGENIQKLHVFEKWNPKYDGFGSVSSITFSKVPNTKVRYQWSGVNPATGKESWSEIRPANDTDEFGNRIVPIGLFFPGSKLYAVDQHNDNLKVEIAQYIPLYFEHHVDISWNKVKENKKEYINGITFKKVTDRKVRYKVVVDYNQDKGIKPAYEIDSEGNRYVNFLEYNNGKGIPADVNSIAVYVVDEKDDNIFDKVAEYHPWG

SEQ ID NO: 151 - protein, 266 aa, Bacillus sp.
MAILNLRDILQRAADADTSEGTGTGILNSNVKISSTELGIPNTGLVINTPGTSLSYTETYENRTGQNSQPQIINFKRETHNTFSTKVTQGFEFGTGLEVSASTNIFFASVETKVSASFKYNISTDTTIESSETIIWERQFPIIIPKQSKAVITYFIRFGGPFTQEINFWTTVTGTYMKKSTLSPIPIGQLIGTLREQNPNLVINTGPQMVGEGPFTRLRFQGTLQMTGTIGIDAYATEEDFPLGNNPSLPTSRTIPLQTAPRTLFF

SEQ ID NO: 152 - protein, 556 aa, Bacillus sp.
LCYMNKQDTQVAELSVIDEFNGIIGFAQNIGGIMNMIAGTPSIEDMTLDQLVTNYDALVNIQTNINEINQQLAEVIAIGSEDTELINQLIDINNVQSTELDEINGEIQDIDNMLNVYLPEIVSMLEGISQQLVGISQQINQMMQMLNAISKQLNKIAANVALNSTIAEIEPHYQKIKYVITQFNELNDELVTAYSSQINNNELNLGADDIDTGALAAVIAWAKMVVAIDLNDLRLSLDAMNDAILGDNLYGNSALVSTAEFYTANTTYAQSIYTSMYRYLSTLCGLQTNAYMLVDTARKILSLPEEDNQDLMNSPISQQKELFASLSSGFSNVFYSTESIDMDPADYGPMNQSYEIDLAPPAGNALLGFNMTSVPDATGDVKKGTLHVEYYYGNILTNYGVDVASINVATADYPMANYIPSNMTFNLPDGGLPNIDSNTIVVGFKLKITTDSMGQAFMVPFVVTAPYDPTKNGVGTTTKDVVIPEGTNINVLNMPIGIVSDQFLSPILNMTMGKDENDQYCFMVESALKNYVNATDMKDAGTDLAVSPYYSTDTAE

SEQ ID NO: 153 - protein, 553 aa, Artificial Sequence
  synthetic
MNKQDTQVAELSVIDEFNGIIGFAQNIGGIMNMIAGTPSIEDMTLDQLVTNYDALVNIQTNINEINQQLAEVIAIGSEDTELINQLIDINNVQSTELDEINGEIQDIDNMLNVYLPEIVSMLEGISQQLVGISQQINQMMQMLNAISKQLNKIAANVALNSTIAEIEPHYQKIKYVITQFNELNDELVTAYSSQINNNELNLGADDIDTGALAAVIAWAKMVVAIDLNDLRLSLDAMNDAILGDNLYGNSALVSTAEFYTANTTYAQSIYTSMYRYLSTLCGLQTNAYMLVDTARKILSLPEEDNQDLMNSPISQQKELFASLSSGFSNVFYSTESIDMDPADYGPMNQSYEIDLAPPAGNALLGFNMTSVPDATGDVKKGTLHVEYYYGNILTNYGVDVASINVATADYPMANYIPSNMTFNLPDGGLPNIDSNTIVVGFKLKITTDSMGQAFMVPFVVTAPYDPTKNGVGTTTKDVVIPEGTNINVLNMPIGIVSDQFLSPILNMTMGKDENDQYCFMVESALKNYVNATDMKDAGTDLAVSPYYSTDTAE

SEQ ID NO: 154 - protein, 926 aa, Bacillus sp.
MNDNVGKCTEQWNARNVLQSGITESDILNAIVENDYKYLLTLVPPDPDFDESNYILLKNGVAGALGVAGVLVGLTTAGIAISTGVGISVLAALIGIYFDFEGPSGKASAVWNNIRKYVESFVKGEIEQYHYERLVSELQGCAADIKLYTSYLSKGLPYESAALSYCRMAISNFTHIIPSFQQQGYEVLTLPLFTQVAKLHLLLYRDLVLFGKNWGVTDKDHLNDKKNFKQLIQVYTSYAKNIYEQGLKKKEDSNNPSGWEYTCYKVDFGQGNNSPLDLTKKWNDICRYRLGMQLSVLDVIAQFPLLDPENYPMGTIIKQSREVHSPIVGAILKTSDITYPDRAKIKIDKTEDIDKILDVKYEGELMELLMENSGFNNFIVDGIDVIRQYKDKITDVTRGVDDCIRIKGDTTYARKRLPLSHLLPLEFVKANCTKGGAFNKFSGRYPNGLINSFPTVDSPSDCYISPKKHKLSSARLFGKYTRGENLSVSSGIICGFRQKELNPKHILSAQFITQVPAEMHGDKGIKEFRTKNEIINGQNAMYSNIEGNTKEAYLRYDIFGFQNAAYHCKVRCRLAYKGNDQSTIDILQNEMKRGTISLTSTESATDAIPGKLGSYIVTESIPITLTEGRNNIKIVYKSNSKDNELFIDRIEFIPVSTSFTIGETNGKITFTVKPDGTLQASNTNGQKPISNDSSRFWKVFVSGKDTGFSFNGTTYVDTVAMKFNTEFHGETNKWKFPGNSLSVLEFTKTIPQGDIDGKLEIVKVADKNQQHIMQLKKNTIVNLEETVAADYNIFAGGELIYQCKKNVKLKTIMDAFNALNIRAFSLRIKKDQETIQYSEIATDVVNNLFQVQDGMNAPDKQQLKPYFDSYNTRVAKNVIRLSSPINPNLVDLLKSAEVLADTCETTPQNIDFLTCSENAQNTGTCK

SEQ ID NO: 155 - protein, 595 aa, Artificial Sequence
  synthetic
MAGALGVAGVLVGLTTAGIAISTGVGISVLAALIGIYFDFEGPSGKASAVWNNIRKYVESFVKGEIEQYHYERLVSELQGCAADIKLYTSYLSKGLPYESAALSYCRMAISNFTHIIPSFQQQGYEVLTLPLFTQVAKLHLLLYRDLVLFGKNWGVTDKDHLNDKKNFKQLIQVYTSYAKNIYEQGLKKKEDSNNPSGWEYTCYKVDFGQGNNSPLDLTKKWNDICRYRLGMQLSVLDVIAQFPLLDPENYPMGTIIKQSREVHSPIVGAILKTSDITYPDRAKIKIDKTEDIDKILDVKYEGELMELLMENSGFNNFIVDGIDVIRQYKDKITDVTRGVDDCIRIKGDTTYARKRLPLSHLLPLEFVKANCTKGGAFNKFSGRYPNGLINSFPTVDSPSDCYISPKKHKLSSARLFGKYTRGENLSVSSGIICGFRQKELNPKHILSAQFITQVPAEMHGDKGIKEFRTKNEIINGQNAMYSNIEGNTKEAYLRYDIFGFQNAAYHCKVRCRLAYKGNDQSTIDILQNEMKRGTISLTSTESATDAIPGKLGSYIVTESIPITLTEGRNNIKIVYKSNSKDNELFIDRIEFIPV

SEQ ID NO: 156 - protein, 655 aa, Artificial Sequence
  synthetic
MNDNVGKCTEQWNARNVLQSGITESDILNAIVENDYKYLLTLVPPDPDFDESNYILLKNGVAGALGVAGVLVGLTTAGIAISTGVGISVLAALIGIYFDFEGPSGKASAVWNNIRKYVESFVKGEIEQYHYERLVSELQGCAADIKLYTSYLSKGLPYESAALSYCRMAISNFTHIIPSFQQQGYEVLTLPLFTQVAKLHLLLYRDLVLFGKNWGVTDKDHLNDKKNFKQLIQVYTSYAKNIYEQGLKKKEDSNNPSGWEYTCYKVDFGQGNNSPLDLTKKWNDICRYRLGMQLSVLDVIAQFPLLDPENYPMGTIIKQSREVHSPIVGAILKTSDITYPDRAKIKIDKTEDIDKILDVKYEGELMELLMENSGFNNFIVDGIDVIRQYKDKITDVTRGVDDCIRIKGDTTYARKRLPLSHLLPLEFVKANCTKGGAFNKFSGRYPNGLINSFPTVDSPSDCYISPKKHKLSSARLFGKYTRGENLSVSSGIICGFRQKELNPKHILSAQFITQVPAEMHGDKGIKEFRTKNEIINGQNAMYSNIEGNTKEAYLRYDIFGFQNAAYHCKVRCRLAYKGNDQSTIDILQNEMKRGTISLTSTESATDAIPGKLGSYIVTESIPITLTEGRNNIKIVYKSNSKDNELFIDRIEFIPV

SEQ ID NO: 157 - protein, 289 aa, Unknown
  Unknown organism from environmental sample
VRFPMSISFNIVTGDSKEKVKVIASGTAVDLLPKEEFSTWGADTFNLNKSIEKSEGRIPNDVFFCDPTPWNNLYDTYGWRPVKRHLKVVACEVVQVTSVPTIVATRKLFNKSKNTATFQTSITETVTNSVAHKKMTQHTIKVGQSISYGINFIAEGKGETTFEYTYNWGEDITKTQSTELSSSSQVTVVLEPGQSAIAELHAKKGVIKLKVTYEAYVDGLIACNYHPRHKGHHFWAFPARELLKPNVQTIVEDVTIDYYSDGETILKDIEGQMMSPYMGRALFASDDNR

SEQ ID NO: 158 - protein, 285 aa, Artificial Sequence
  synthetic
MSISFNIVTGDSKEKVKVIASGTAVDLLPKEEFSTWGADTFNLNKSIEKSEGRIPNDVFFCDPTPWNNLYDTYGWRPVKRHLKVVACEVVQVTSVPTIVATRKLFNKSKNTATFQTSITETVTNSVAHKKMTQHTIKVGQSISYGINFIAEGKGETTFEYTYNWGEDITKTQSTELSSSSQVTVVLEPGQSAIAELHAKKGVIKLKVTYEAYVDGLIACNYHPRHKGHHFWAFPARELLKPNVQTIVEDVTIDYYSDGETILKDIEGQMMSPYMGRALFASDDNR

SEQ ID NO: 159 - protein, 312 aa, Bacillus sp.
MKRIKKIIPAAFVLSTALFVAPGFSSADTNTTNVENLPVVISAQEGKAPMSAAQVAANGTQLPYIPTGPYEEFPSQWHVSTEDGKVIDYVYVDVVAQQDNVSMSGILKFSGYKYVKPDGTWIKDDENYAPKGNKGDVLYSIAIPKTDPIVADTKLKKDLSWKLIDTNVVDKNGGYHWSKAVTSGISHNISVGLSQTIGMEAGIGDLFKVSASLTWSFGYQHTISEESTVTKTFDFNPKPDYAYDQYRTALYQQVANYSVNPGSGLQKWMSDRTANDPFNQVYNMIGKGNAFEYKVKKSVDYPVDVLVALTSK

SEQ ID NO: 160 - protein, 286 aa, Artificial Sequence
  synthetic
MDTNTTNVENLPVVISAQEGKAPMSAAQVAANGTQLPYIPTGPYEEFPSQWHVSTEDGKVIDYVYVDVVAQQDNVSMSGILKFSGYKYVKPDGTWIKDDENYAPKGNKGDVLYSIAIPKTDPIVADTKLKKDLSWKLIDTNVVDKNGGYHWSKAVTSGISHNISVGLSQTIGMEAGIGDLFKVSASLTWSFGYQHTISEESTVTKTFDFNPKPDYAYDQYRTALYQQVANYSVNPGSGLQKWMSDRTANDPFNQVYNMIGKGNAFEYKVKKSVDYPVDVLVALTSK

SEQ ID NO: 161 - protein, 326 aa, Unknown
  Unknown organism from environmental sample
MTIVNLDEYLTSLVKKVLVVTPPDTKVDTSNLSVTNAESYGFEIKESKPQGTMFMGESTLNNKTNETQTLNSDSFTKTLTDSVTLSVTHGITTGVNISISGKIFGMGAETSMSFEVSTSTTNEQTNEESVAYTVPSQTVVVPAQTTYYVHTLLERNQLKGICRLRADLTGDLIVKIKFWDRDIIANYGKIYDYVNQHQSLLPLPSGISLNHSKKSIHFEGIAEYFYGTGTKFHITVTDKPSSQGTQEHKSVDTKTGLGTYPIGLNGKKLIQKKSKLSFLYGLLFFIFLSVRNPRNVGATPYIMSIPISFICCNCLLGFWSTELTRT

SEQ ID NO: 162 - protein, 1282 aa, Unknown
  Unknown organism from environmental sample
MNQQYNNEYEIMSTGDMGYQPRYPLSNTPKSELQQIHYKDWMNMCADGESRETFADLTVKDGVTIAISITAAVLGASFPVTAAGISIISILMPYWWPETTGTPGTSQAQITWERLMTAAEHLSNQKILESKRSDAIARWQGIQSVGRDYYQAICDLKEDPDNEYKKTKVRDTFDDVEDELKTSMPFFRAQGFEIPMLSMYAQAANMHLLLLRDVVQNGVSWGFQQYEVDRYYSNTDHFLGNPGLLQLLEGYTDYCVQWYNTGLQQQYENNRYNWDTFNDFRRDMTTMVLDIVSLWPTYDPKRYPLPTKSQLTRTVYTDLVGFSGDSEYLQLDIERAEQALVQKPGLFTWLRELSFELGPLSRINFVRGRKMVFNYTGSSNRYEETKGNPGETRETVVIPAPDVGDDIWRISTQVSTNQIPNATIVRGWNFSFTQSLDQKIAWRTEYSPEIVMQGLSCHGPSVSSCDLCISNSPCRSITPNYSSPCDDKLVYSHRFSYLGAGLKSDLTTLTYFSYGWTHVSADANNLIDPKKITQIPAVKGDYLARNARVIKGPGSTGGDLVQLSDGTERGTLSMRLTKPPGSHSYRVRIRYASDTQTQLESILGEDYDSVIVPATTTDITNLTYNKFGYFEIRVFSYNSSSEEEDLIRVDATGSFILDKIEFIPIEGSVEEYLANQDIEKARKAVNGLFTSEAKNALKLNVTDYAVDQAANLVECVPENFHAQEKMILLDQVKVAKRLSQARNLLNYGDFESPDWSGENGWKTSPHVHVAADNPIFKGRYLHMPGATSPSFSNNTYPTYVYQKVDESKLKSYTRYLVRGFVGNSRDLELLVERYGKDVHVEMDVPNDIQYSLPMNECGGFDRCRPVSYQDRFSHACTCKDTASMHTDCQCKDKVNRTATGVYTNVPTGSTMYTDGFHAHKSCGCKNNDMYQNGTHPHKSCGCKDPHVFSYHIDTGCVDPEENLGLWFALKIASEKGVANIDNLEIIEAQPLTGEALARVKKREHKWKQEMTKKRLETEKAVQAAQGAIQPLFTNGQYNRLQFETLFPQIVRAEWLVQQIPYVHHPFLSGALPVVPGMNFDIVQELLTVMGNARALYERRNLVRNGTFSSGTGSWHVSEGVKVQPLQNTSVLVLSEWNHEASQQLRIDPDRGYVLRVTARKEGAGKGTVTMSDCADYTETLTFTSCDYNTVGSQTMTGGTLSGFVTKTLEIFPDTDRIRIDIGETEGTFQVESVELICMEQMEDRLYDMAGNLEEEMQVLQRSRSGSHTLDPLCGTRIGEFGC

SEQ ID NO: 163 - protein, 665 aa, Artificial Sequence
  synthetic
MNQQYNNEYEIMSTGDMGYQPRYPLSNTPKSELQQIHYKDWMNMCADGESRETFADLTVKDGVTIAISITAAVLGASFPVTAAGISIISILMPYWWPETTGTPGTSQAQITWERLMTAAEHLSNQKILESKRSDAIARWQGIQSVGRDYYQAICDLKEDPDNEYKKTKVRDTFDDVEDELKTSMPFFRAQGFEIPMLSMYAQAANMHLLLLRDVVQNGVSWGFQQYEVDRYYSNTDHFLGNPGLLQLLEGYTDYCVQWYNTGLQQQYENNRYNWDTFNDFRRDMTTMVLDIVSLWPTYDPKRYPLPTKSQLTRTVYTDLVGFSGDSEYLQLDIERAEQALVQKPGLFTWLRELSFELGPLSRINFVRGRKMVFNYTGSSNRYEETKGNPGETRETVVIPAPDVGDDIWRISTQVSTNQIPNATIVRGWNFSFTQSLDQKIAWRTEYSPEIVMQGLSCHGPSVSSCDLCISNSPCRSITPNYSSPCDDKLVYSHRFSYLGAGLKSDLTTLTYFSYGWTHVSADANNLIDPKKITQIPAVKGDYLARNARVIKGPGSTGGDLVQLSDGTERGTLSMRLTKPPGSHSYRVRIRYASDTQTQLESILGEDYDSVIVPATTTDITNLTYNKFGYFEIRVFSYNSSSEEEDLIRVDATGSFILDKIEFIPI

SEQ ID NO: 164 - protein, 348 aa, Bacillus sp.
MSNRLKGIYSVNILREEYNMKKMKNFKKGLVVTAAALTLGTGFVPAASAAENTPVSEPTIQAYGAQNMNFEQFTRYVLERDGHLKKGAYTEIQDLKTTGTQLKSLDTFPLINDTNQDRNMEVPRKGYERSDSLTVSKSEEYKFGQEVGFQIGAEGVWNVSGKVSFEQMRGSTESKFNSSTEKVEYGGGSQLVKAGQALEVEFLYEENTYEGKAVTTSEITGDLGEWMSSIIYFGDGGEEVHRGSREWPAMDKSFYGAPLHSAYEILKPRMINGVMMNDISINVPTRSDNYSLTTKEINEKVLFDDKAKKAYLKEHVSPFKGVSGVKIVQRLKDAKTGQVISEKAVKTF

SEQ ID NO: 165 - protein, 329 aa, Artificial Sequence
  synthetic
MKKMKNFKKGLVVTAAALTLGTGFVPAASAAENTPVSEPTIQAYGAQNMNFEQFTRYVLERDGHLKKGAYTEIQDLKTTGTQLKSLDTFPLINDTNQDRNMEVPRKGYERSDSLTVSKSEEYKFGQEVGFQIGAEGVWNVSGKVSFEQMRGSTESKFNSSTEKVEYGGGSQLVKAGQALEVEFLYEENTYEGKAVTTSEITGDLGEWMSSIIYFGDGGEEVHRGSREWPAMDKSFYGAPLHSAYEILKPRMINGVMMNDISINVPTRSDNYSLTTKEINEKVLFDDKAKKAYLKEHVSPFKGVSGVKIVQRLKDAKTGQVISEKAVKTF

SEQ ID NO: 166 - protein, 300 aa, Artificial Sequence
  synthetic
MAENTPVSEPTIQAYGAQNMNFEQFTRYVLERDGHLKKGAYTEIQDLKTTGTQLKSLDTFPLINDTNQDRNMEVPRKGYERSDSLTVSKSEEYKFGQEVGFQIGAEGVWNVSGKVSFEQMRGSTESKFNSSTEKVEYGGGSQLVKAGQALEVEFLYEENTYEGKAVTTSEITGDLGEWMSSIIYFGDGGEEVHRGSREWPAMDKSFYGAPLHSAYEILKPRMINGVMMNDISINVPTRSDNYSLTTKEINEKVLFDDKAKKAYLKEHVSPFKGVSGVKIVQRLKDAKTGQVISEKAVKTF

SEQ ID NO: 167 - protein, 356 aa, Unknown
  Unknown organism from environmental sample
MKKSCNPKKVNPNEVNPTEFVLFDLEQYLDHNIANITFYRVDLNCIKSGCKPSGGWHFNSDYLPTPTSSQIPNACVPARTTYYPFGNCVYEPYQENAYWADSSALVAEGTDVYEEIESMALETPIIADRHEYHNNSSLEQSYVTPAYSETVSTTTTNTTTHGCKVNPKISYSRKSKYKVGIKDIENGFNLELGAEYNFSNTNTNTVTSTRTVTFPSFTTKVPPYTTTIVTVILNKGTYANYNVPVQTNLFGRFSQVDIRYNPPRVYRQYDLYPFVELVQTCCASTCSACVTDMVQALPDNLTVRFNGTGSFIADVASNNFVVTTEEVDNATGATISKKTEYVPAIYGPATTTVTTS

SEQ ID NO: 168 - protein, 332 aa, Bacillus sp.
LMKSYKKMAVMMPFACMLSIGVVSMPTTSFADATKSTILNVNTKSDNVYNEDKFIQDIKDRMTPEGTAANPNTATKYVSKPEYHTDVNNLDITAHFDSWGPTQQIELLSYKNDGLVDQTWYSPEKSIKTTESFTYSNQEGVKLGVSSKSTLAVKIPFVAEGGQEITLSSEFNYTHTSSNTSTHEEQIIFKSQPVICKAGYTTTYFGIVKAANFSGTFKTKSKVHVPKLSYYDQNGYGWTWQESRPNFYNSKVYYLLTNGSKPTPSYLNFESYLQPDNKNIQIPVVDIQSEFSGEGGHYSEIYVKATPIDAPNKSVTLPLKEYQNRVAKGLPL

SEQ ID NO: 169 - protein, 308 aa, Artificial Sequence
  synthetic
MPTTSFADATKSTILNVNTKSDNVYNEDKFIQDIKDRMTPEGTAANPNTATKYVSKPEYHTDVNNLDITAHFDSWGPTQQIELLSYKNDGLVDQTWYSPEKSIKTTESFTYSNQEGVKLGVSSKSTLAVKIPFVAEGGQEITLSSEFNYTHTSSNTSTHEEQIIFKSQPVICKAGYTTTYFGIVKAANFSGTFKTKSKVHVPKLSYYDQNGYGWTWQESRPNFYNSKVYYLLTNGSKPTPSYLNFESYLQPDNKNIQIPVVDIQSEFSGEGGHYSEIYVKATPIDAPNKSVTLPLKEYQNRVAKGLPL

SEQ ID NO: 170 - protein, 385 aa, Bacillus sp.
MVTTFKQNKFYEIRPAKDISKIIQVGWGADSMGDTFEVAAQNNLGNWSKFLLIPLDNNYYAIVCKNSGLVMKVSRADNSNGRWIEQWEWLDEEWEQGRESIFFEPVGNDTYAFQYKETGKYMTLSGRRTDVGTVCEQWEWENGDWQHWKIKELSESIVLPSVEISPPPVAPDYNPSGDINQILPEKSPTVTVSTALLPFFMVDDPYYTDVLKKFQSNPYYLLVKKQYYEKIGYQILAPHESYSYTETNGIIESQQQEMEHTLSMTIGIDFGLQFKKFSSSFKYEISNSIRTLISKSLQKSKETTATRTVKNPLQQPASWTQYQLVTEYQVLRANGSPLASPWSVKQENHSVSRFYPSIQGLLESTIQRELLEVKNKKTNVSFDNQ

SEQ ID NO: 171 - protein, 310 aa, Bacillus sp.
MKRMKKIIPAAFVLSSALLVAPGFSSAATDTTNVGNLPVVISSQEGKAPMSAEQVAQNGTQLPYVPTGPYEEFPGQWHVSTDEGKLIDYAYVDVVAKGNTSGDVLNLSGYKAVKPDGTWFKSGEKIPVAGSEGSVLYSIAIPKTDPVVADTKLKKELDWKLIDSNVIDKNSGYHWSKAVTSGVSHNISVGLSQTIGMEAGFGDIVKMSASLTWSFGYQNTISEESTVTKTFDFNPKSDYAYDQYRTALYQQVANYSVVPGAGLQKWMSDRTANDLLNQMSNAFGKGNAVEYKVKKSVDYPVDVLVALTSK

SEQ ID NO: 172 - protein, 284 aa, Artificial Sequence
  synthetic
MATDTTNVGNLPVVISSQEGKAPMSAEQVAQNGTQLPYVPTGPYEEFPGQWHVSTDEGKLIDYAYVDVVAKGNTSGDVLNLSGYKAVKPDGTWFKSGEKIPVAGSEGSVLYSIAIPKTDPVVADTKLKKELDWKLIDSNVIDKNSGYHWSKAVTSGVSHNISVGLSQTIGMEAGFGDIVKMSASLTWSFGYQNTISEESTVTKTFDFNPKSDYAYDQYRTALYQQVANYSVVPGAGLQKWMSDRTANDLLNQMSNAFGKGNAVEYKVKKSVDYPVDVLVALTSK

SEQ ID NO: 173 - protein, 335 aa, Bacillus sp.
MKYKKILFVAPMVMMLGTPAIISPIIALAAETKTSTTAQTNTVKGYLLKNGVTTPVYENKKLYSKPSGPVSPEFPTLPADPLAGVPKEGTTITESGNMGDILYFENNMTSNDIVNGQKGHLPNGKVGKKYYQKTSEGIIGGFYDPDTFELYPMININALQKQFPSKDAQEIIDAFDGQTKVKRETKYELLDSAITDRSVKYQYSKAITSGLTTTNAFGFSATLGWKISAKIGGGIIPAEVTSEMSTSLSGNYNHTITVTSSETRTQQFNVDKVDNTDYKYNKYTVAVYQLRSTYTTIPGSNLQKFLNNSGYKLANTVYKYNEDQLYFGVTPGSHL

SEQ ID NO: 174 - protein, 307 aa, Artificial Sequence
  synthetic
MAETKTSTTAQTNTVKGYLLKNGVTTPVYENKKLYSKPSGPVSPEFPTLPADPLAGVPKEGTTITESGNMGDILYFENNMTSNDIVNGQKGHLPNGKVGKKYYQKTSEGIIGGFYDPDTFELYPMININALQKQFPSKDAQEIIDAFDGQTKVKRETKYELLDSAITDRSVKYQYSKAITSGLTTTNAFGFSATLGWKISAKIGGGIIPAEVTSEMSTSLSGNYNHTITVTSSETRTQQFNVDKVDNTDYKYNKYTVAVYQLRSTYTTIPGSNLQKFLNNSGYKLANTVYKYNEDQLYFGVTPGSHL

SEQ ID NO: 175 - protein, 384 aa, Unknown
  Unknown organism from environmental sample
MKKYKKILLAAPLACMLGTGIFTLPNATHAAATTPNTEITSWDEWNSDKWKYTREAYGATATPKSIAAVLGRSGINISGHPTIRQKFNLKEYEFVDYSGYYTNSNSSYQDQIENKLELEFLGTSPAVKLGKVQLKDQGNIILGDYSNHTSVNQTRTTPVKSYEYTETFNFSQQAGFKMTVGASVKVKAGIPGLAEGEVTGSVSQEFSASASYGKTYSEKKTITYPSQQIILQPNGKTQYYSNVKQAEFNGSLEADSAIKDIQVTLPIASRENHRGYREFDEGARREVYKVLRYETVTLTSKDLYELIVSFGNDIPPYLKLDHKNRDVLARTTFNYEGQSGFYETAYIKFEPFQQVQAQTQGQPEAQTQAEIMTFTEYMEKMKTK

SEQ ID NO: 176 - protein, 355 aa, Artificial Sequence
  synthetic
MAATTPNTEITSWDEWNSDKWKYTREAYGATATPKSIAAVLGRSGINISGHPTIRQKFNLKEYEFVDYSGYYTNSNSSYQDQIENKLELEFLGTSPAVKLGKVQLKDQGNIILGDYSNHTSVNQTRTTPVKSYEYTETFNFSQQAGFKMTVGASVKVKAGIPGLAEGEVTGSVSQEFSASASYGKTYSEKKTITYPSQQIILQPNGKTQYYSNVKQAEFNGSLEADSAIKDIQVTLPIASRENHRGYREFDEGARREVYKVLRYETVTLTSKDLYELIVSFGNDIPPYLKLDHKNRDVLARTTFNYEGQSGFYETAYIKFEPFQQVQAQTQGQPEAQTQAEIMTFTEYMEKMKTK

SEQ ID NO: 177 - protein, 397 aa, Bacillus sp.
MKSISKKVMAGLLVGATSLSIWAPISEAAAPENNRYYNIQLKSNQKKVWNVTRASNDNDRAIILWQGGSADNEKFAFFQLDGGAYAIVNKNSGKIVTYGEGSWFADRDRLGGETLQQQSWNGEAKQKWNLRDLGSNNYEIVNQANGKVPSYRWMGSVVDNVEYLQMDNSNPSDADKVFTLFNGTVNFLGKNITVFNDTFSVPNLPATGNRPDAPNYTGGVDQQLPQTSNSVVVGASLIPCIMVNDNQASDYTKIHNSPYYTLVKEEYWDKTFSAVIPAGLTRNYSFKTGMTSVDQQKMTDTLSMKIGADFGLKFGNATASIKSEISRTLQTEISTTNTEASEETVTSTVISEPGKTTGYTEYQLATKYTLKRADGSIVSDPWVVKNNKITIARKNAQ

SEQ ID NO: 178 - protein, 368 aa, Artificial Sequence
  synthetic
MPENNRYYNIQLKSNQKKVWNVTRASNDNDRAIILWQGGSADNEKFAFFQLDGGAYAIVNKNSGKIVTYGEGSWFADRDRLGGETLQQQSWNGEAKQKWNLRDLGSNNYEIVNQANGKVPSYRWMGSVVDNVEYLQMDNSNPSDADKVFTLFNGTVNFLGKNITVFNDTFSVPNLPATGNRPDAPNYTGGVDQQLPQTSNSVVVGASLIPCIMVNDNQASDYTKIHNSPYYTLVKEEYWDKTFSAVIPAGLTRNYSFKTGMTSVDQQKMTDTLSMKIGADFGLKFGNATASIKSEISRTLQTEISTTNTEASEETVTSTVISEPGKTTGYTEYQLATKYTLKRADGSIVSDPWVVKNNKITIARKNAQ

SEQ ID NO: 179 - protein, 302 aa, Unknown
  Unknown organism from environmental sample
MAIFDVEADLLDNLKWYEQAYNNANPSTFKNPTVYDMNVSDLDVVPITTEFESTPQLTNSATQIVRNATSEKQSQTVLFSEKSIETFSRSTTEGYKIGSSIKSTTSFKVKVGFLVSGEISQSIEVAVTGEYNHSSTETTTTTNEKLWQVTQPVIIPPYTQVTATLQIFSGPFVVPAKTKATIQGKGIINGTSNWASFINYTKYDGRYWNAYNRGSALYNDRNSWPGYKKIYVGTGSGTGSLRLEGEARINAQVGLYAVTEFKESPLPGYAGVGSNRTYYAPNIILGDGSIIQFPQYQRYLQR

SEQ ID NO: 180 - protein, 696 aa, Unknown
  Unknown organism from environmental sample
MNPYQNKNAYEILNAFPNHSNMSNDSFPTYPLATNPQTLLRDIDYKDWLNVCNSNPIDYRKISASLSVYISAKAATSTAIGIVSKLLSYLGLGIIADAVNITMSIVNTLWTEQNDTWGALIKHIEDLMNQKISDLVLSNANVELDALKRILSEYNAALENWKNKPNEPSALENIKFQFMITHNFFVERLAVFAHPGYEVLLLSVYAQAANLHLLLLRDASIYGNQWGLAQSNGDYYYGRQMYYMNEYTNHCLMWYRNGLDRLRGSTGAQWLNFNRFRTEMTLTVLDIIALFPTYDYQKYPIFTKIELSRVIYTDPVIYGGFSQLPSNNAGYFDVLEREATGIPSFTKWLKKIEISTGEIRFATNPHTGDWVTNVWNGNTNTFSFTDSASEVVENHGIITNNRTTLNINTSDNFRVDLRAHCFSQGAPFYDVFGIGRSQFFNRGTSIIYENEIGITDRYNRHRHQNITISLPGVHSEQATANDYSHRLADVRNFTGALHQNNSRMNMGRSSLICHGWTHVSMERENRVKVDEITQIPAVKSNGWMFSGELLKGPGHTGGDLVNLGNGDRYTLNIIFPAQAYRIRIRYASNGDGEMGIDVNGVGHTRFSTKRTFFHNNYNDLKFQDFNLVDTLFIYNATYTGLRTMWLYCYSTARVIIDKIEFIPVGTFANQLCKESEEYNQKSGCTCKQMYNNNYSK

SEQ ID NO: 181 - protein, 664 aa, Artificial Sequence
  synthetic
MNPYQNKNAYEILNAFPNHSNMSNDSFPTYPLATNPQTLLRDIDYKDWLNVCNSNPIDYRKISASLSVYISAKAATSTAIGIVSKLLSYLGLGIIADAVNITMSIVNTLWTEQNDTWGALIKHIEDLMNQKISDLVLSNANVELDALKRILSEYNAALENWKNKPNEPSALENIKFQFMITHNFFVERLAVFAHPGYEVLLLSVYAQAANLHLLLLRDASIYGNQWGLAQSNGDYYYGRQMYYMNEYTNHCLMWYRNGLDRLRGSTGAQWLNFNRFRTEMTLTVLDIIALFPTYDYQKYPIFTKIELSRVIYTDPVIYGGFSQLPSNNAGYFDVLEREATGIPSFTKWLKKIEISTGEIRFATNPHTGDWVTNVWNGNTNTFSFTDSASEVVENHGIITNNRTTLNINTSDNFRVDLRAHCFSQGAPFYDVFGIGRSQFFNRGTSIIYENEIGITDRYNRHRHQNITISLPGVHSEQATANDYSHRLADVRNFTGALHQNNSRMNMGRSSLICHGWTHVSMERENRVKVDEITQIPAVKSNGWMFSGELLKGPGHTGGDLVNLGNGDRYTLNIIFPAQAYRIRIRYASNGDGEMGIDVNGVGHTRFSTKRTFFHNNYNDLKFQDFNLVDTLFIYNATYTGLRTMWLYCYSTARVIIDKIEFIPV

SEQ ID NO: 182 - protein, 912 aa, Bacillus sp.
LKFTNIYKYAAVAALLIPTAGVPTTVSFAENKVESKKEKKSAKEEKQENPNGLVGHYFKDATFTGLSYIQVGEKNTLMKKEKESKEDIPLEKAQSVRWNGTIKPDQTGEYKLFTSASKDIVVQVNGETVLKKDGQENIEQSIKLEKDKSYEIKIEHKIDAANPSAELKLSWSIDNKEKEPIPEKNILSPNFAEKAEADTNPLIPDHSLFNEKQRILFPPKDTDTDKDGIPDGLETDGYTFNGLQIIPWNGLLGELGYKKYVSSPFKLKTAADPYTDFEKVTGHIPEATKYEARDPLVAAAPAVTVNMEKLLMSKNENVSEGTSGTHTVGTSTTTSNGFSLGGNAGRTNSPKGWFAGITGLFSYNNSKSVTRETSDSESWSSTIGINTAEAAFLNANVRYHNNGTAPIYETKPTTNFVMQPSGDSIFTVTSGPNVIGNSVGPGETYPKAGQAPISLNQANPTATVNIVIDAPTLDALQTGTETLDLETTQTDGRYGIIDSNGNLVQNESQKWSPILTDINTASGGLILTDSQANGAILERRVAAKNPNDPNDQTPEITIGEAIEKAFNAKKINGKLYYTNQDGKNVSLDEGSVHLITDESTQEKIENQLENLPLERQHVYNAKWERGMNLELITPDTIYDFENALNLGWSNILPSLDAYTGLGGALTTSGASASKQLDLKPETSYVVKAFVKNPDIVQKNVSLFVGKYSGSNPVPNDAKVTQVIEGSDHNWHEMELYFNTGDEPESYRTLTISAGVGKSIEFDDVSIKELSNPFTEYNFIKNGTFEEGGLYWNVENGASIIGTHNVFLPYANSAINSDLFELGRGYFVGGSGQNSVSKSHPVKISLHKENGTEIDSVVQNSIVPFDGTYPPTYFKLTNISDATKVYLRVSAMEDSSDLGVSNISLRKLIDNRE

SEQ ID NO: 183 - protein, 912 aa, Artificial Sequence
  synthetic
MKFTNIYKYAAVAALLIPTAGVPTTVSFAENKVESKKEKKSAKEEKQENPNGLVGHYFKDATFTGLSYIQVGEKNTLMKKEKESKEDIPLEKAQSVRWNGTIKPDQTGEYKLFTSASKDIVVQVNGETVLKKDGQENIEQSIKLEKDKSYEIKIEHKIDAANPSAELKLSWSIDNKEKEPIPEKNILSPNFAEKAEADTNPLIPDHSLFNEKQRILFPPKDTDTDKDGIPDGLETDGYTFNGLQIIPWNGLLGELGYKKYVSSPFKLKTAADPYTDFEKVTGHIPEATKYEARDPLVAAAPAVTVNMEKLLMSKNENVSEGTSGTHTVGTSTTTSNGFSLGGNAGRTNSPKGWFAGITGLFSYNNSKSVTRETSDSESWSSTIGINTAEAAFLNANVRYHNNGTAPIYETKPTTNFVMQPSGDSIFTVTSGPNVIGNSVGPGETYPKAGQAPISLNQANPTATVNIVIDAPTLDALQTGTETLDLETTQTDGRYGIIDSNGNLVQNESQKWSPILTDINTASGGLILTDSQANGAILERRVAAKNPNDPNDQTPEITIGEAIEKAFNAKKINGKLYYTNQDGKNVSLDEGSVHLITDESTQEKIENQLENLPLERQHVYNAKWERGMNLELITPDTIYDFENALNLGWSNILPSLDAYTGLGGALTTSGASASKQLDLKPETSYVVKAFVKNPDIVQKNVSLFVGKYSGSNPVPNDAKVTQVIEGSDHNWHEMELYFNTGDEPESYRTLTISAGVGKSIEFDDVSIKELSNPFTEYNFIKNGTFEEGGLYWNVENGASIIGTHNVFLPYANSAINSDLFELGRGYFVGGSGQNSVSKSHPVKISLHKENGTEIDSVVQNSIVPFDGTYPPTYFKLTNISDATKVYLRVSAMEDSSDLGVSNISLRKLIDNRE

SEQ ID NO: 184 - protein, 1260 aa, Unknown
  Unknown organism from environmental sample
MNNNEFEIMDNGAVSYQSRYPLAKKPGSEWQQMNYKDWVNMCTNEEAGDIFNDTAGAVRTGLIVGTGIAWALLGLIPVYGTPLSAVAGLFNVLIPYWWPEQPGVQPGSPQAQFTWDQLMTAVEDLTDKKILESKRSDAIARWQGLQILGHDFYVALCDWTKDPDNDRKKEVLRQEFNDLNDALKLSMPHFGAQGFELPMLSMYAQAANMHLLVLKEVVQNGLGWGFEQYQVDRFYFDSTTSQGQGLVQLQANYTNYCVEWYERGLQEQYNTGNWNKFNDFRRNMTIMVLDTVAVWPTYDPRLYPYPTQSQLTRTVYTNPVGNKVEIFPGPIDRMENNMVSPPRLFSWLRKWEITTRGKHPFLEVPCLSVKTFHNTLSSMQWSITQGDRPYPIERTLTLDIPNPYYQDDIWKVDTLGSAGVDFWIYGWDFYFTKSTVQNLPIYERDSYVHKFNGLPCRGKDSGICDPCNFENPCRNETPNTSIPCEDKMQYSHRLSDIGASPPHPIPPVDYRLLNFGYGWTHVSADAKNLIDGSKKIIQIPAVKGKALYGEASVVRGPGSTGGDLVSLRPGGKLVVTVTLPPPDQPGDFKSYVLGIRFANDLTTRLKVSYLDGYGESRSVTETFGVTPNPGPDGRLRFQSFAYQDFDTMWITQRKGLNEFDFTFENLSNFNVDEISNFQIDKLEFIPIERPLAEYQASQDIEKARKAVNALFTSDAKNALKLNVTDYAVDQAANLVECVSEEFHAQEKMILLDQVKYGKRLSQARNLLNYGDFESSDWSGENGWRTSHHVHVASDNPIFKGRYLHIPGAMSPQFSNKTYPTYAYQKVDESKLKSYTRYLVRGFVGNSKDLELLVERYGKDVHVEMDVPNDITYSLPINECGGSDRCKPASYQASPPHTCTCKDKENRNLTNRYTTEPTGSAVYLNRPDHKSCGCKNDDMYQNGTHLHKSCGCKDPHVFTYHIDTGYVDQEENLGLFFALKIASENGIANIDNLEIIEAQPLTGEALARVKKREQKWKQDMVQKRAQTEKAVQAAQGAIQTLFTNVQYNYLKFETLFPQIVHAEKLVQQIPYAYHPFLGEALPTVPGMNFEIIQQLLVVIENARVLYEQRNLVRNGTFSSGTGNWHVTEGVKVQLLQDTSVLVLSEWSHGASQQLHIDSDRGYVLRVTARKEGGGKGTVTMSDCAAYTETVTFTSCDYNTVDSQMMTRGTLSGFVTKTLEIFPDTDRIQIDIGETEGTFQVESVELLCMKQMENAGNFEDEM

SEQ ID NO: 185 - protein, 687 aa, Artificial Sequence
  synthetic
MNNNEFEIMDNGAVSYQSRYPLAKKPGSEWQQMNYKDWVNMCTNEEAGDIFNDTAGAVRTGLIVGTGIAWALLGLIPVYGTPLSAVAGLFNVLIPYWWPEQPGVQPGSPQAQFTWDQLMTAVEDLTDKKILESKRSDAIARWQGLQILGHDFYVALCDWTKDPDNDRKKEVLRQEFNDLNDALKLSMPHFGAQGFELPMLSMYAQAANMHLLVLKEVVQNGLGWGFEQYQVDRFYFDSTTSQGQGLVQLQANYTNYCVEWYERGLQEQYNTGNWNKFNDFRRNMTIMVLDTVAVWPTYDPRLYPYPTQSQLTRTVYTNPVGNKVEIFPGPIDRMENNMVSPPRLFSWLRKWEITTRGKHPFLEVPCLSVKTFHNTLSSMQWSITQGDRPYPIERTLTLDIPNPYYQDDIWKVDTLGSAGVDFWIYGWDFYFTKSTVQNLPIYERDSYVHKFNGLPCRGKDSGICDPCNFENPCRNETPNTSIPCEDKMQYSHRLSDIGASPPHPIPPVDYRLLNFGYGWTHVSADAKNLIDGSKKIIQIPAVKGKALYGEASVVRGPGSTGGDLVSLRPGGKLVVTVTLPPPDQPGDFKSYVLGIRFANDLTTRLKVSYLDGYGESRSVTETFGVTPNPGPDGRLRFQSFAYQDFDTMWITQRKGLNEFDFTFENLSNFNVDEISNFQIDKLEFIPI

SEQ ID NO: 186 - protein, 438 aa, Brevibacillus sp.
MYERGTIILIHADTWNNRIKSISEAAAKKIPYVGAIVSFAIGQLWPTDKADIFSLIKDQVKGLVDQAILNKEMEERKHEIEGLKDTMNQYVDAGNHEKGGFMTSMHTQLNIMHHKLTESTNSIHLIPLTITIANIHLTLLRERLSHGKEIYTEDNTTVWQKDLTKRYQDYHKFFLEIYPKWKTWRESKIEIKWYTDKNPTTVPPFFYWAAHGYAKDTFAEEKPIHYRDDFNSIETTFQGVCQAIKESWMNDAIAKIAASIATTFTLHRYLPGREDEPAIVDPNLETIWMGPYSLSIFGNDSKVSYAVNVTDHPGELKQVYIREYNSIDGMQLIYTDHSGNFVGNPKGGESHYLPATQDKYVTGMKMRFSSGIICRLEVLFSDGSSSGMLGNRKNWSGTDVDAVVESNYKLVCGAYKTGSGPSGTTGISVIKLGFKYSN

SEQ ID NO: 187 - protein, 430 aa, Artificial Sequence
  synthetic
MIHADTWNNRIKSISEAAAKKIPYVGAIVSFAIGQLWPTDKADIFSLIKDQVKGLVDQAILNKEMEERKHEIEGLKDTMNQYVDAGNHEKGGFMTSMHTQLNIMHHKLTESTNSIHLIPLTITIANIHLTLLRERLSHGKEIYTEDNTTVWQKDLTKRYQDYHKFFLEIYPKWKTWRESKIEIKWYTDKNPTTVPPFFYWAAHGYAKDTFAEEKPIHYRDDFNSIETTFQGVCQAIKESWMNDAIAKIAASIATTFTLHRYLPGREDEPAIVDPNLETIWMGPYSLSIFGNDSKVSYAVNVTDHPGELKQVYIREYNSIDGMQLIYTDHSGNFVGNPKGGESHYLPATQDKYVTGMKMRFSSGIICRLEVLFSDGSSSGMLGNRKNWSGTDVDAVVESNYKLVCGAYKTGSGPSGTTGISVIKLGFKYSN

SEQ ID NO: 188 - protein, 312 aa, Unknown
  Unknown organism from environmental sample
MEIKKDTYYKMVNRNSGLIADVAGRSTSNSAHLEQYPWQGETFQQWSFEEVDGYYKIVNQNSGLVADVTGRSTSNSTHLEQYQWQNETFQQWSLEEVETIALPSVDTQELPDPPQYTSLDDNLPDSTDPVITAYTLMPCIMVDDNGWSAVSKINQGPYYMLTKTQYWKKIDSHTFAPSAQYTSKTTYGMSEEDQESMTQTTSISVTADAGFSFGKMSSSISGTVTNELQVSQSTTTDKMTTQENDETITNDHDYEVAWSLYALVTEYELKRADGTSVTSPWTVINKHDERESYYPLDSPPVPTSQANLKIVK

SEQ ID NO: 189 - protein, 326 aa, Bacillus sp.
MKKKVITALALSIPVLISSGNMANAQINSPAKMSTGNTNSQKLLNYQEQRKQVVNIETAIREAIPGYVKYMHGFGESVSPGVIINDIKLIDVEEKYIDPEYPVQAKLISRGAEKLVQSIEEDIYNDHPSAELTKSHTFQHAVSNASTLTKSITHSHKGGVKFTYKAKVNLIGADSEVGGEVSYEYTNSNQEGTSDSKTFSKTFSSTASAKLQPISRAKLVSNVYTSPAIYEIKSRSFFTGSVHFSYVLASNPNKVETKTVSLYELFTRTDYPTRDRIAEKYHMWSQTFWKPENGEAVQALLFEGTSILNIDETYRTETRLKDIKSM

SEQ ID NO: 190 - protein, 302 aa, Artificial Sequence
  synthetic
MQINSPAKMSTGNTNSQKLLNYQEQRKQVVNIETAIREAIPGYVKYMHGFGESVSPGVIINDIKLIDVEEKYIDPEYPVQAKLISRGAEKLVQSIEEDIYNDHPSAELTKSHTFQHAVSNASTLTKSITHSHKGGVKFTYKAKVNLIGADSEVGGEVSYEYTNSNQEGTSDSKTFSKTFSSTASAKLQPISRAKLVSNVYTSPAIYEIKSRSFFTGSVHFSYVLASNPNKVETKTVSLYELFTRTDYPTRDRIAEKYHMWSQTFWKPENGEAVQALLFEGTSILNIDETYRTETRLKDIKSM

SEQ ID NO: 191 - protein, 301 aa, Bacillus sp.
MEKRIIYMSMSIQYIDYYLGGLPILNNMPTIHKQKIIKQLLEGTPFINSYYSTPIKGDIFNLDATIIAPDLHENTILEFVPITQKLYTNSTYEIQTHVLPSVVQETETNYIATVTQGFSFNNKEIYNFSTSIFASQINQIIAKTSTEISIPYNFNFLGSNFIHEIFSMIIPEEIVTIPIRTHSYIEMFYAKLIVKPTNIYYTGKMKGYVEQSDFSEKKYDLWTFIQQNPNIFTPETTNLTCNYENQSIDFHAQGILEGVFLANDFFIKVTNTPIDENNGTVNIMSRNLEKKLLYSSNIYVS

SEQ ID NO: 192 - protein, 294 aa, Artificial Sequence
  synthetic
MSMSIQYIDYYLGGLPILNNMPTIHKQKIIKQLLEGTPFINSYYSTPIKGDIFNLDATIIAPDLHENTILEFVPITQKLYTNSTYEIQTHVLPSVVQETETNYIATVTQGFSFNNKEIYNFSTSIFASQINQIIAKTSTEISIPYNFNFLGSNFIHEIFSMIIPEEIVTIPIRTHSYIEMFYAKLIVKPTNIYYTGKMKGYVEQSDFSEKKYDLWTFIQQNPNIFTPETTNLTCNYENQSIDFHAQGILEGVFLANDFFIKVTNTPIDENNGTVNIMSRNLEKKLLYSSNIYVS

SEQ ID NO: 193 - protein, 1288 aa, Unknown
  Unknown organism from environmental sample
MRCDRFKMIGGEFMNQYYRNNEMEILDPGVRRAKYPYAQNTRTGLQSMNYKEWLTLCEGNDALSPSPFVAPQDIVSVTLDITGALLGLIPKVGGPLKAGVSILNSIIKLLWPKPTPEEPTIDPNEIWIQLMEKVEQLIDQKISQEAFNAAIGRLNGLKRALDLYQVSFSLWAEDQTDEELKEDLRTRFTNALFEMVTTIETFKYKGQEINLLTVFAQAADLHLLLLREGVMYGLQWGFDERTVQSFYTNLQNEGLKDLLPQYTDYCTYWYNEGLKITYTLKPDLSNTERYPWAADKPDWNQRVLEELEGWNLFNDWRRDVTIMALDLVSLWPTYDLYYYNNLEYGVTTELTRPVYSQAAGTSWGSILPRDRYEQGIVRSPHLVTWLNSIDFHLNPGPFNASNSYKHYTGLKMKYYYSGRDYTTYESPLIGTTSYSKKTINVEAKYSNNDIFQADIKHNDAVYTMDFFKNNGNIEKVGYPRDPNYSTFSWPPETTISNYDHQMTWISGPAEKNTIPAFGIEWMHESCSPFNAIADDTVENPIITQIPAVKGTNLSGNATVIKNPGHTGGDLVQLPMNSASQAQLLVNMESPYSKVGKTYHIRIRYASSTNANLQVDHCGFNGGSCSSSVTIPIKPTYSNNELTYNAFQYVDVFTITLQNADFSIAFSNKGGGPIILDKIEFIPIEESVEEYEANQTFKKARKAVNALFANDEKIALQLNITDYDVNQVANIVDCISDDMFPKEKMVLLDQVKQAKRLSQARNLLNYGDFESPDWSDENGWKVSNNVMVQTDRPISRGRYLNMPGARIIEFSDTIYPTYVYQKIDESKLKPYTRYLVRGFVKSSKKLDLLVTRYGKDIRTEMNVPSYQVINNQVVRMPDGCDTKQVSNYTISPTMPMDPCQNAYTTNDSIVMNPSTNGMCEDKHHFLFHIDVGELDMRANPGIEVGFKISSPEGMAKLDNLEVIEAQPLTGEALARVKKREQKWKKEREHQCVKTEKAVTSATQAVDSLFTSPQKNKLKETVNMQSIENAEAKVNAIPYVQNPEFKDLPGMNTLIFQQLQSNIMTALNLYSRRNVIRNGDFSRGLTNWLVTDGVDVEERDGKFSVLVISQWDANVSQDVCVQPEHGYVLRVTARKEGAGKGYVTISDCTPENTETITFTSDEMIIAERPPVTIQTSSVCDITDNYGTGSFPYNNNVENNYVESLDITPCSCGSYGREACSCGSNYMRNSSSERNIKQSYTSTQRIPNRNSSVYVTKMIEMFPETNRIRIEIGETQGTFLVDSIELICMED

SEQ ID NO: 194 - protein, 670 aa, Artificial Sequence
  synthetic
MNQYYRNNEMEILDPGVRRAKYPYAQNTRTGLQSMNYKEWLTLCEGNDALSPSPFVAPQDIVSVTLDITGALLGLIPKVGGPLKAGVSILNSIIKLLWPKPTPEEPTIDPNEIWIQLMEKVEQLIDQKISQEAFNAAIGRLNGLKRALDLYQVSFSLWAEDQTDEELKEDLRTRFTNALFEMVTTIETFKYKGQEINLLTVFAQAADLHLLLLREGVMYGLQWGFDERTVQSFYTNLQNEGLKDLLPQYTDYCTYWYNEGLKITYTLKPDLSNTERYPWAADKPDWNQRVLEELEGWNLFNDWRRDVTIMALDLVSLWPTYDLYYYNNLEYGVTTELTRPVYSQAAGTSWGSILPRDRYEQGIVRSPHLVTWLNSIDFHLNPGPFNASNSYKHYTGLKMKYYYSGRDYTTYESPLIGTTSYSKKTINVEAKYSNNDIFQADIKHNDAVYTMDFFKNNGNIEKVGYPRDPNYSTFSWPPETTISNYDHQMTWISGPAEKNTIPAFGIEWMHESCSPFNAIADDTVENPIITQIPAVKGTNLSGNATVIKNPGHTGGDLVQLPMNSASQAQLLVNMESPYSKVGKTYHIRIRYASSTNANLQVDHCGFNGGSCSSSVTIPIKPTYSNNELTYNAFQYVDVFTITLQNADFSIAFSNKGGGPIILDKIEFIPI

SEQ ID NO: 195 - protein, 320 aa, Bacillus sp.
MKLKVLATTGLALSIGFTSLGVLEKPTFADETKENIVVPQSNSIKGYLYKNGIGTPVFESSKAKSVAVELPELPSNPFVAVPNEGKVVENLGSMGNILYFEGDMPSNIGSIISDKTLKYYLEKKEDGTIRIGGYDPDTLHLYPLVSPVPVIEPHKAFDNNTKLKRETKYELIASNIMDNAVAYKFDKSITYGVSTTGTVGLASTIGAKVSTEVGGGIIPGKVSTELSASLTKSFSFGITITDQETIAHNFSVEKVDNPSYQYNKYAVAAYQLRSTYSPIMGAGLEQFIKENPQFKGLSNKMYKYNEEQMYFGVTPGSHIN

SEQ ID NO: 196 - protein, 292 aa, Artificial Sequence
  synthetic
MDETKENIVVPQSNSIKGYLYKNGIGTPVFESSKAKSVAVELPELPSNPFVAVPNEGKVVENLGSMGNILYFEGDMPSNIGSIISDKTLKYYLEKKEDGTIRIGGYDPDTLHLYPLVSPVPVIEPHKAFDNNTKLKRETKYELIASNIMDNAVAYKFDKSITYGVSTTGTVGLASTIGAKVSTEVGGGIIPGKVSTELSASLTKSFSFGITITDQETIAHNFSVEKVDNPSYQYNKYAVAAYQLRSTYSPIMGAGLEQFIKENPQFKGLSNKMYKYNEEQMYFGVTPGSHIN

SEQ ID NO: 197 - protein, 403 aa, Bacillus sp.
LKTNKWLRTIPTACLLSSAILVLPTSSFAATDMSSCSKNDYSQSCVEQTDPGVNNRTHAMYETINRLVEMDDLNEQTNWSGNSWYNFIRFNYLILPSQEQDVLNQLNSIPKDNVELKQVLKALNGYHNRTNTITDTNTLQVSNVNVNKYIEDPKPDPNSDQYREINTKAINESYSQTLTKKTQNITESMQSSKQLTVTHSLNTGAKEGLKSSIGVSVPLIGEVKGELSFEYSVNYGYTNASATIDTITHTVTSPQEDISLAPRTGAVVTAKLSTPVYKTKLLGTSKIKGYYTDQVNSYPTWVQLGIYNKFKVISQHNPTVWNKLKELGFSLDDQTKEVIFNGVIDLTDRHAPGSTFESRTQIYELDANGNINYNKPVGKPQTKTGQVQKSNVSNSTSRLLLVK

SEQ ID NO: 198 - protein, 375 aa, Artificial Sequence
  synthetic
MATDMSSCSKNDYSQSCVEQTDPGVNNRTHAMYETINRLVEMDDLNEQTNWSGNSWYNFIRFNYLILPSQEQDVLNQLNSIPKDNVELKQVLKALNGYHNRTNTITDTNTLQVSNVNVNKYIEDPKPDPNSDQYREINTKAINESYSQTLTKKTQNITESMQSSKQLTVTHSLNTGAKEGLKSSIGVSVPLIGEVKGELSFEYSVNYGYTNASATIDTITHTVTSPQEDISLAPRTGAVVTAKLSTPVYKTKLLGTSKIKGYYTDQVNSYPTWVQLGIYNKFKVISQHNPTVWNKLKELGFSLDDQTKEVIFNGVIDLTDRHAPGSTFESRTQIYELDANGNINYNKPVGKPQTKTGQVQKSNVSNSTSRLLLVK

SEQ ID NO: 199 - protein, 403 aa, Artificial Sequence
  synthetic
MKTNKWLRTIPTACLLSSAILVLPTSSFAATDMSSCSKNDYSQSCVEQTDPGVNNRTHAMYETINRLVEMDDLNEQTNWSGNSWYNFIRFNYLILPSQEQDVLNQLNSIPKDNVELKQVLKALNGYHNRTNTITDTNTLQVSNVNVNKYIEDPKPDPNSDQYREINTKAINESYSQTLTKKTQNITESMQSSKQLTVTHSLNTGAKEGLKSSIGVSVPLIGEVKGELSFEYSVNYGYTNASATIDTITHTVTSPQEDISLAPRTGAVVTAKLSTPVYKTKLLGTSKIKGYYTDQVNSYPTWVQLGIYNKFKVISQHNPTVWNKLKELGFSLDDQTKEVIFNGVIDLTDRHAPGSTFESRTQIYELDANGNINYNKPVGKPQTKTGQVQKSNVSNSTSRLLLVK

SEQ ID NO: 200 - protein, 638 aa, Unknown
  Unknown organism from environmental sample
MCQTITPLCTPIDSDINSVAAAIGVIASIIGFIPGPGEAIGLILGTFSSIILFLWPENKTIVWEEFTHRGLNLIRPELSQEAIEIIVNPLKGYYNALLEQLRSFEREFAIWDNNRNPSTTGDGLRRFSAIDAAIITLKHQLTINVSNKPALLSLYAQTANIDLILYQRGAKYGDEWARYTRNQPIPFKTSKEYYTDLKTKIKDYTNDIAQTYRDGLNIIKNKPNISWDVFNEYRREITLSALDLVALFQNYDICIYPIQTKTELTRKVYMPSFYLQALQQSNIETMENLLTHPPSLFTWLNELDLYTVRENYSPSLLLSSLSGLQAKSRYTQNSTIFYNPAQGVGTGTPTRVGLANLFIYKIFMSQYHHPNACYPIAGISDMTFYKSDYNGNMPTSQTYQAGRNSNNIINTFMNGPQNASTSNNISINQTKHILSDIKMVYSRTGGIYPLYDFGYSFAWTHTSVDPDNLIVPNRITQIPAVKAYTLTSPARVIAGPGHTGGDLVALLNSGTQSGSMEIRCKTGSFTGASRRYGIRMRYAANNAFTVSLSYTLQGGNTLGTTFVTEHTFSRTNNIIPTDLKYEEFKYKEYNQIITMTSPQNTIVTINIRQLNPSSNDQLIIDRIEFYPLDQGVAACTVN

SEQ ID NO: 201 - protein, 555 aa, Unknown
  Unknown organism from environmental sample
VNSMFTSDTKNTLKIETTDYAIDQAAISIECMSDENSSKEKMILWDEVKQAKQLSHSRNLLQNGDFEDIFNGWITSNNMSIQNDHSTFKGQYLNMYGARDIDGNLFPTYIYQKIDESKLKPYTRYLVRGFVGSSKELKLMVIRYGKEIDTIMSVPNDIPHVSSMPACNELYNNEQSLHQSRNVGYYTPMPEYISNTYQCMPDQKQLICHDSHQFKFHIDTGGVDYNTNLGMLILFKISNPDGYATLGNLEVIEEGPLTGEALSYVKRKEKKWNQHMEKKRLETQQAYDPAKQAVDALFTNAQGEALHYHTTLDHIKNADRLVQSIPYVYHDWLSDVPGINYDLYIGLHARIMKAYNLYDARNVITNGDFTQGLTGWHATGKAALQQMDGASVLVLSNWSAGVSQNLHVQDHHGYVLRVIAKKEGPGKGYVTMMDCNGNQETLKFTSCEEGYRTKTVEVFPESDRVRIEIGETEGTFYIDSIELLCMQGYASNNNPRTGNMYEKSYNGIYNQNTSDVYHQGYTNNDNQDSSSMYNQKYINNDDLHSGCTCNQGYNR

SEQ ID NO: 202 - protein, 319 aa, Lactococcus sp.
MSKKLVSLVAVCTVAFGGIGALSSTSLSVHADVKGDSITAPLNDRLKTISQQMYNKYRKSNSSWGGLTPKSDWKGQNFISASIPENTWITEGSQLGEPSQTEVIPIFFGESPLSNDTDRTQTLYSDSFKHTVSTVTTTTTSTKFNAGLGSITVPIISKTLKKDLTFNSNTTNESKETVTNEMISPSQPVSIPPHSKVVVKVSLLKAKYIGKVNLKATSNRADSSVYFNAIRGLHTGGQQTKKITEKMPFNFVTRLNSGYLFDDQHIQYTPYTLNGSPEVKLSYQGEGDYTFENGSKYEVNVSDVKTKKVLSTRIVDINQ

SEQ ID NO: 203 - protein, 289 aa, Artificial Sequence
  synthetic
MDVKGDSITAPLNDRLKTISQQMYNKYRKSNSSWGGLTPKSDWKGQNFISASIPENTWITEGSQLGEPSQTEVIPIFFGESPLSNDTDRTQTLYSDSFKHTVSTVTTTTTSTKFNAGLGSITVPIISKTLKKDLTFNSNTTNESKETVTNEMISPSQPVSIPPHSKVVVKVSLLKAKYIGKVNLKATSNRADSSVYFNAIRGLHTGGQQTKKITEKMPFNFVTRLNSGYLFDDQHIQYTPYTLNGSPEVKLSYQGEGDYTFENGSKYEVNVSDVKTKKVLSTRIVDINQ

SEQ ID NO: 204 - protein, 658 aa, Bacillus sp.
LSMNQNYGSNEVEILNSRNMSCQPRYPFAKAPSSKLHSMGYKDYMERRTKGVETYSGLDGLRTSISIVLSLISNIPGPLAVPAKFISIIFPFLWPSGSQQAMWEAFMKAAEEMINQKIEAFARNQAISRLTGVQDVVSLYQRDAKNFNDYPTSEPLKRQVREQFISTNTFVTGSMPLFAVGGQEVPLLTTYVEAANLHLLLLRDAVMFGESWGMDPLTVAGYQSDLNTRIAVYTDYCVRIYNQGLQKAKTLQANVDRKYRMMEEWNLFNKYRRDMTLMVLDLVAVWQTYSPQLYRIGTRIELTREIFTDLRGNSANIMPSNGWTSADIMEGYIMPPPSLSTWLDYTDIWTQRGTGVASTEQYAGVQNRYKYTLDNQIRTSPLLGRREGVMHTVLASPTIINRVDNRVGTSLYTFSFYREGSASPFQTFGDTFSQSNSIKENRIPIEGNQTRANHRMSRISGMENVLYYFNSNGNVVTTPKYMFCMGEGWTHISMSPENRILSDSITQIPAVKGNVVDNGATVVRGPGSTGGDLVKLPAYNQQWTQLRVKVRPSTTAKTRRYIVRIRYASEANANLFVGKYVDAANRWYETGNYAVNQTFSGNMTYNAFQYLDTISFLANEEEFKIELRCNSGGPIYIDKIEFFPVNPIPEPLVTEGTY

SEQ ID NO: 205 - protein, 643 aa, Artificial Sequence
  synthetic
MNQNYGSNEVEILNSRNMSCQPRYPFAKAPSSKLHSMGYKDYMERRTKGVETYSGLDGLRTSISIVLSLISNIPGPLAVPAKFISIIFPFLWPSGSQQAMWEAFMKAAEEMINQKIEAFARNQAISRLTGVQDVVSLYQRDAKNFNDYPTSEPLKRQVREQFISTNTFVTGSMPLFAVGGQEVPLLTTYVEAANLHLLLLRDAVMFGESWGMDPLTVAGYQSDLNTRIAVYTDYCVRIYNQGLQKAKTLQANVDRKYRMMEEWNLFNKYRRDMTLMVLDLVAVWQTYSPQLYRIGTRIELTREIFTDLRGNSANIMPSNGWTSADIMEGYIMPPPSLSTWLDYTDIWTQRGTGVASTEQYAGVQNRYKYTLDNQIRTSPLLGRREGVMHTVLASPTIINRVDNRVGTSLYTFSFYREGSASPFQTFGDTFSQSNSIKENRIPIEGNQTRANHRMSRISGMENVLYYFNSNGNVVTTPKYMFCMGEGWTHISMSPENRILSDSITQIPAVKGNVVDNGATVVRGPGSTGGDLVKLPAYNQQWTQLRVKVRPSTTAKTRRYIVRIRYASEANANLFVGKYVDAANRWYETGNYAVNQTFSGNMTYNAFQYLDTISFLANEEEFKIELRCNSGGPIYIDKIEFFPV

SEQ ID NO: 206 - protein, 656 aa, Artificial Sequence
  synthetic
MNQNYGSNEVEILNSRNMSCQPRYPFAKAPSSKLHSMGYKDYMERRTKGVETYSGLDGLRTSISIVLSLISNIPGPLAVPAKFISIIFPFLWPSGSQQAMWEAFMKAAEEMINQKIEAFARNQAISRLTGVQDVVSLYQRDAKNFNDYPTSEPLKRQVREQFISTNTFVTGSMPLFAVGGQEVPLLTTYVEAANLHLLLLRDAVMFGESWGMDPLTVAGYQSDLNTRIAVYTDYCVRIYNQGLQKAKTLQANVDRKYRMMEEWNLFNKYRRDMTLMVLDLVAVWQTYSPQLYRIGTRIELTREIFTDLRGNSANIMPSNGWTSADIMEGYIMPPPSLSTWLDYTDIWTQRGTGVASTEQYAGVQNRYKYTLDNQIRTSPLLGRREGVMHTVLASPTIINRVDNRVGTSLYTFSFYREGSASPFQTFGDTFSQSNSIKENRIPIEGNQTRANHRMSRISGMENVLYYFNSNGNVVTTPKYMFCMGEGWTHISMSPENRILSDSITQIPAVKGNVVDNGATVVRGPGSTGGDLVKLPAYNQQWTQLRVKVRPSTTAKTRRYIVRIRYASEANANLFVGKYVDAANRWYETGNYAVNQTFSGNMTYNAFQYLDTISFLANEEEFKIELRCNSGGPIYIDKIEFFPVNPIPEPLVTEGTY

SEQ ID NO: 207 - protein, 1261 aa, Bacillus sp.
MNPNYNNKHEILDTNNRSYQTRYPLANAPGVELQQMSYKDWMDRCEQESLAITFKSVITTALDITSAILGAAKSPKAKVARAAVQVLNTVIKLLWPEPEKPSEPAYDIDFIWKELIGRVEILIEEQIDQEAYNAAIGRLSGLKRALNLYQLSFDLWVEDENDPELQEDVRIRFTSALFELVTTIETFKYSGQELNLLTVFVQAADFHLMLLQQGVMYGVRWGFDQRTVDSFYQNDRGEGLKNLLPKYSDYCTYWYGEGLNRAKNLKANLSDTVRYPWAANLEDMSVLQELEDWNLYNDYRRDMTILVLDLVAVWPTYDLHYYDNGNYGVQSELTRSIYSQAVGNVMGTVFTKEQYEASFVRPPHLVTWLEKMFIQIRPKEQGAPIDATMAGVSLYYSYSGWDNTVDDILLGYPSYSSSEIRVLSKSNVIVQDQEKNRAIYNTDLQHDKLVDRFVFYQNSGEVNYAGRDNPSSYKTFAWDTDITNYSSQMTWINGPVNEGHFGYIQAYAPEWIPASCEPFNNIVDAEDVITQIPAVKARELRYGARVIKGVGNTGGDLVSIAPDGLCELYVSFPNVVRRYQVRIHYACQDPTKINLSIGDSRHDITIPSTYSGGALTYDSFGYATSEYSYLFYADFYDEKQIVRLGNSFDISQQDIIIDKIEFIPVDIFYAEEQDLEKARQAVNALFTNDAKNTLQLDVTDYAVDQAANLVECVSEEFHAQEKMILLDQVKFAKRLSQARNLLNYGDFESSEWSGENGWKTSPHVHVASDNSIFKGRYLHMPGAMSPQFSSNIYPTYAYQKVDESKLKSYTRYLVRGFVGNSKNLELLVERYGKDVHVKMDVPDDIRYSLPMNECGGFNRCKPASYQARTPHACTCTDTAVAHTDCQCKDKEKRTSTNMYPNVPAGSDMYQNGTHPNKSCGCKDPHVFTYHIDTGCVDMEENVGLFFALKIASENGVANIDNLEIIEAQPLTGEALARVKKREQRWKQERVKKRLETEKAVQAAQTAIQNLFTNAQQNRLKFETLFSQIVNAEMLVQQIPYVYHPFLSGALPVVPGPNFEIAQQLSLSIGKARMLFDRRNFVQNGTFSSGTGSWHVTEGVEVQPFQNTAVLVLSEWSHEASQQVRIDSDRGYVLRVTARKEGAGKGTVTMSDCADYTETLTFTSCDYNMVGSQTMTEGTLSGFVTKTLEIFPDTDRIRIDIGETEGMFKIENVELICMEQMEDHLYDMAGNVADEMQYLGQSSSTRDSLDPICDTLIDDFGC

SEQ ID NO: 208 - protein, 665 aa, Artificial Sequence
  synthetic
MNPNYNNKHEILDTNNRSYQTRYPLANAPGVELQQMSYKDWMDRCEQESLAITFKSVITTALDITSAILGAAKSPKAKVARAAVQVLNTVIKLLWPEPEKPSEPAYDIDFIWKELIGRVEILIEEQIDQEAYNAAIGRLSGLKRALNLYQLSFDLWVEDENDPELQEDVRIRFTSALFELVTTIETFKYSGQELNLLTVFVQAADFHLMLLQQGVMYGVRWGFDQRTVDSFYQNDRGEGLKNLLPKYSDYCTYWYGEGLNRAKNLKANLSDTVRYPWAANLEDMSVLQELEDWNLYNDYRRDMTILVLDLVAVWPTYDLHYYDNGNYGVQSELTRSIYSQAVGNVMGTVFTKEQYEASFVRPPHLVTWLEKMFIQIRPKEQGAPIDATMAGVSLYYSYSGWDNTVDDILLGYPSYSSSEIRVLSKSNVIVQDQEKNRAIYNTDLQHDKLVDRFVFYQNSGEVNYAGRDNPSSYKTFAWDTDITNYSSQMTWINGPVNEGHFGYIQAYAPEWIPASCEPFNNIVDAEDVITQIPAVKARELRYGARVIKGVGNTGGDLVSIAPDGLCELYVSFPNVVRRYQVRIHYACQDPTKINLSIGDSRHDITIPSTYSGGALTYDSFGYATSEYSYLFYADFYDEKQIVRLGNSFDISQQDIIIDKIEFIPV

SEQ ID NO: 209 - protein, 292 aa, Unknown
  Unknown organism from environmental sample
MAIFDLDAYLLDLARKFANDPRLIKADTSLLSMKNAESYGFEISDNKPQGTMFMGESELTNRTNETQTINSDSFTKTITDSVTLSVTNGMSAGVNISVGGKIFGMGVETSMSFEVSTSTTNEQTSSESVSYTVPSQAVVVPPQTTYYVYTSLQRNQLEGIIRLKADLSGDFAIESVPGFMFKWGDMYDFINRNQLLHPLPSGMSLNHKDKSLHFEGVAEYIYGTGTKFYVTISDTPSSQGTQEHKPFDAKTGLGTYEIQLDGKKLGFDINDLKDKMDPKDFEKLKELQNEIV

SEQ ID NO: 210 - protein, 1237 aa, Bacillus sp.
MKEGGLYMNQNYNDDYEIINTGGMNYQSRYPLANAPDTEFQQMNYKDWINTCTSGDPEETFTSVKDGVVIATGIGWAILGFVPAFGPGLSALSGILNVSLPFLWPEAAGTPGTPEAQLSWETLMTAAEQLVGKEIDKQVRAQAITELQGIQEAIRVYQDAACDWKRDPTNEEVKETLRTQFISTNTVIFDRMPSFRVAGFETSLLTTYVEAANLHLALLRDGVQFGREWGMAPATVNRYYNYLTTNTASYTNYCIHWYNSALNTQYEANTYDWNKFNDFRRDMTFMVLDIVSFWPTYDPRRYPKVTKSQLTRTVYTSSSGITRGFIGNLEPSLVHNPRLFSWLRQVKCYSLSPSSSSTIAGLQQTFQNTLNDNLWNSGVKGFETAAVEYLNIPSPEISDEIWKIITYVDANPYNGWLDQMRGFQFQFTQSPTRNIAYSGTYSLLSGPPCRWVFPFTGSCDFCVPNNPCKNVIGDESVPCNDKNLYGHRFSYLGSRGDDTPRPFLTNFAYGWTHVSADPNNLIDAEKITQIPAVKAYNLENARVIKGPGSTGGDLVEFSSGTTQGTMYMAITSPKGENQYYDLRLRYASNNPVTTIRINQSGPSYAYSTATDITDLTYDKFGYVDINYRIGMSPERTEHFTLKVTDTDSGTFILDKIEFIPIEGSLEAYQADQDFEKARKAVNALFTNDAKNALKLNITDYAVDQAANLIECVSEDFHAQEKMILLDQVKFAKRLSQVRNLLNYGDFESPDWSGENGWKTSSHVHVASDNPIFKGCYLHMPGAMSPQFSNNTYPTYIYQKVDESKLKSYTRYLVRGFVGNSKDLELLVERYGKDVHVEMDVPNDMQYTLPGNECGGVDRCQPVSYQTAFPHISAVAHTDCRCKDKENHTSTNLYTNEPTGSTVYMNGSHAHQSCGCKNNDTYQNGTDSHKSCGCKDPHVFTYHIDTGCVDQEENVGLFFALKIASENGVANIDNLEIIEAQPLTGEALARVKKREQKWKQEMVQKRLQTDKAVQAAQGAMQTLFTNAQYNRLKFETLFPQIVHAEKLVQQIPYVYHPFLSGALPTVPGMNFEIIQQLLAVIGNARALYEQRNLVHNGTFSSGTGSWKVTEGVKVQPLQDTSVLVLSEWSHEASQQVHVDPDRGYVLRVTARKEGGGKGTVTMSDCADYTETLTFTSCDFNTSGSQTMTSGTVSGFVTKTLEIFPDTDRIRIDIRETEGTFQVESVELICMRQMEDPMY

SEQ ID NO: 211 - protein, 654 aa, Artificial Sequence
  synthetic
MNQNYNDDYEIINTGGMNYQSRYPLANAPDTEFQQMNYKDWINTCTSGDPEETFTSVKDGVVIATGIGWAILGFVPAFGPGLSALSGILNVSLPFLWPEAAGTPGTPEAQLSWETLMTAAEQLVGKEIDKQVRAQAITELQGIQEAIRVYQDAACDWKRDPTNEEVKETLRTQFISTNTVIFDRMPSFRVAGFETSLLTTYVEAANLHLALLRDGVQFGREWGMAPATVNRYYNYLTTNTASYTNYCIHWYNSALNTQYEANTYDWNKFNDFRRDMTFMVLDIVSFWPTYDPRRYPKVTKSQLTRTVYTSSSGITRGFIGNLEPSLVHNPRLFSWLRQVKCYSLSPSSSSTIAGLQQTFQNTLNDNLWNSGVKGFETAAVEYLNIPSPEISDEIWKIITYVDANPYNGWLDQMRGFQFQFTQSPTRNIAYSGTYSLLSGPPCRWVFPFTGSCDFCVPNNPCKNVIGDESVPCNDKNLYGHRFSYLGSRGDDTPRPFLTNFAYGWTHVSADPNNLIDAEKITQIPAVKAYNLENARVIKGPGSTGGDLVEFSSGTTQGTMYMAITSPKGENQYYDLRLRYASNNPVTTIRINQSGPSYAYSTATDITDLTYDKFGYVDINYRIGMSPERTEHFTLKVTDTDSGTFILDKIEFIPI

SEQ ID NO: 212 - protein, 1230 aa, Artificial Sequence
  synthetic
MNQNYNDDYEIINTGGMNYQSRYPLANAPDTEFQQMNYKDWINTCTSGDPEETFTSVKDGVVIATGIGWAILGFVPAFGPGLSALSGILNVSLPFLWPEAAGTPGTPEAQLSWETLMTAAEQLVGKEIDKQVRAQAITELQGIQEAIRVYQDAACDWKRDPTNEEVKETLRTQFISTNTVIFDRMPSFRVAGFETSLLTTYVEAANLHLALLRDGVQFGREWGMAPATVNRYYNYLTTNTASYTNYCIHWYNSALNTQYEANTYDWNKFNDFRRDMTFMVLDIVSFWPTYDPRRYPKVTKSQLTRTVYTSSSGITRGFIGNLEPSLVHNPRLFSWLRQVKCYSLSPSSSSTIAGLQQTFQNTLNDNLWNSGVKGFETAAVEYLNIPSPEISDEIWKIITYVDANPYNGWLDQMRGFQFQFTQSPTRNIAYSGTYSLLSGPPCRWVFPFTGSCDFCVPNNPCKNVIGDESVPCNDKNLYGHRFSYLGSRGDDTPRPFLTNFAYGWTHVSADPNNLIDAEKITQIPAVKAYNLENARVIKGPGSTGGDLVEFSSGTTQGTMYMAITSPKGENQYYDLRLRYASNNPVTTIRINQSGPSYAYSTATDITDLTYDKFGYVDINYRIGMSPERTEHFTLKVTDTDSGTFILDKIEFIPIEGSLEAYQADQDFEKARKAVNALFTNDAKNALKLNITDYAVDQAANLIECVSEDFHAQEKMILLDQVKFAKRLSQVRNLLNYGDFESPDWSGENGWKTSSHVHVASDNPIFKGCYLHMPGAMSPQFSNNTYPTYIYQKVDESKLKSYTRYLVRGFVGNSKDLELLVERYGKDVHVEMDVPNDMQYTLPGNECGGVDRCQPVSYQTAFPHISAVAHTDCRCKDKENHTSTNLYTNEPTGSTVYMNGSHAHQSCGCKNNDTYQNGTDSHKSCGCKDPHVFTYHIDTGCVDQEENVGLFFALKIASENGVANIDNLEIIEAQPLTGEALARVKKREQKWKQEMVQKRLQTDKAVQAAQGAMQTLFTNAQYNRLKFETLFPQIVHAEKLVQQIPYVYHPFLSGALPTVPGMNFEIIQQLLAVIGNARALYEQRNLVHNGTFSSGTGSWKVTEGVKVQPLQDTSVLVLSEWSHEASQQVHVDPDRGYVLRVTARKEGGGKGTVTMSDCADYTETLTFTSCDFNTSGSQTMTSGTVSGFVTKTLEIFPDTDRIRIDIRETEGTFQVESVELICMRQMEDPMY

SEQ ID NO: 213 - protein, 198 aa, Bacillus sp.
MREDEYFRDAMFHSNHEPLEILLEASEGVSSIEQTKNKPECYEEVKTQIPFCCAVNIPHGFDYVPNGTHKIAYTLDCLSVVKETCRKTIQVDGCGPVEVTLNLLKVVGCIPYIVNATVESECGKDCEHDPHGKYHRVSVCCSGNICVENVLKCSIECLPHYTIDCHNVVVSDFTVKPLHDHGCEMLQFTGKIEFKHIL

SEQ ID NO: 214 - protein, 290 aa, Bacillus sp.
MAILDLSRTINDYFYSRFPNRLSGSEEGYVFKQLDRTDSLSIKGKMTLPDNVIPVTGPGKTIVKTDSIINGSSGSSSIPIEKTFTFKETTTDSVSTTRTSGVDTSIDVELNLGATIDFLNIGGKTGFSTKTSLSNSKTISQTKERVWEESVKINVPPATKATLMYTVTTGPFDVLIPVDFVISGTVTGTGIWIFENFLAWSVAQMEDFAPSNLRRRTETINIVNLLKSRNIPGFTFNGDTEAIFKGEVRLQGELGVQSTLQLTTVSLSGNTPPVVQSFPTTPTYNTVLFA

SEQ ID NO: 215 - protein, 331 aa, Bacillus sp.
MKLKVLLATGLALSIGLTSLGSITSTFAAETPKVEQSNEELASSRGVDANGNFTGWVINDYNALQNGGVMSFTPYDISDLKVISQKTKVKSIDFAQNDNRANSFPSTINSMTKTFKHSDSMTIHAEAGFKIGAKVSAEASVPGLAKLTAEMSTETSFSGGVANVKGKEVTVGYGGEQMKADPFQLYRIDYLLEETEFDGEITTTREVTSIGNNLKFYTMTGDGSYYPGATEKYKNGVTGKQVYDFFKDLKSMANSYGVMIVKNGLGAYSINKGEFDKHYYFDEVNKKVYTQGKKAQFDGVTGNGLTAKPSVIGGKARSNIDVTPKLIHKFN

SEQ ID NO: 216 - protein, 304 aa, Artificial Sequence
  synthetic
MAETPKVEQSNEELASSRGVDANGNFTGWVINDYNALQNGGVMSFTPYDISDLKVISQKTKVKSIDFAQNDNRANSFPSTINSMTKTFKHSDSMTIHAEAGFKIGAKVSAEASVPGLAKLTAEMSTETSFSGGVANVKGKEVTVGYGGEQMKADPFQLYRIDYLLEETEFDGEITTTREVTSIGNNLKFYTMTGDGSYYPGATEKYKNGVTGKQVYDFFKDLKSMANSYGVMIVKNGLGAYSINKGEFDKHYYFDEVNKKVYTQGKKAQFDGVTGNGLTAKPSVIGGKARSNIDVTPKLIHKFN

SEQ ID NO: 217 - protein, 312 aa, Bacillus sp.
VLLGPNLYTLNSLKQGIYNIKTYLKGVLPMSINLNEIINTYGNTVIAAQNPFPLSHFTGITTTAQANTQNVTIQGDTIPLTNIQIPVVEQPLVSQSSTFTNNTSLEQSEEFTFSEATTDTITTTRTDGVDYTAGIETSIGGNIGVKDVGGLEFSTKVSFSTKISYTNSTAIANTKNTTWTKKYTAKAKANTRILAEFIIMGATFNQDIDVDIIMSGNVIYQVRWDRSGGGPSAELHENGPLVTVPISQIFTGIPNVIIRPDGTVQYKGKVNLKGKIGLRAYINLTEQSLTGSLPPTTTTIPVDTSSRTLLFA

SEQ ID NO: 218 - protein, 283 aa, Artificial Sequence
  synthetic
MSINLNEIINTYGNTVIAAQNPFPLSHFTGITTTAQANTQNVTIQGDTIPLTNIQIPVVEQPLVSQSSTFTNNTSLEQSEEFTFSEATTDTITTTRTDGVDYTAGIETSIGGNIGVKDVGGLEFSTKVSFSTKISYTNSTAIANTKNTTWTKKYTAKAKANTRILAEFIIMGATFNQDIDVDIIMSGNVIYQVRWDRSGGGPSAELHENGPLVTVPISQIFTGIPNVIIRPDGTVQYKGKVNLKGKIGLRAYINLTEQSLTGSLPPTTTTIPVDTSSRTLLFA

SEQ ID NO: 219 - protein, 344 aa, Bacillus sp.
MSNRLKGIYAANILREEKNMKKMKNFKKGLVVTAAALTLGTGFVPAASAAENTPASEPTIQAYGKAGMNFGEFTRWVLERDGHLKKGAYTEIQDLKTTGTNLKSLDKFPLINDTNMDRNMEVPKKGYERTDSLTVTKSEQYTFGQEVGFQIGAEGVWSASGKVSFEQMRGSSESTFKSATEKVEYGGGSQLVEAGQALEIEFLYEENTYEGKAVTTSEITGDLGAYIGPIYYFDLDDTAFESARGGRSSSPTTRLYSAYEILKPRMNKGAMMNGMSIYVPTREDQYWMTSNEINNNVLFDDKAKKAYLKDHVSPFKGVSGVQIVQRIKDAKTGQVLSYKPVKTF

SEQ ID NO: 220 - protein, 325 aa, Artificial Sequence
  synthetic
MKKMKNFKKGLVVTAAALTLGTGFVPAASAAENTPASEPTIQAYGKAGMNFGEFTRWVLERDGHLKKGAYTEIQDLKTTGTNLKSLDKFPLINDTNMDRNMEVPKKGYERTDSLTVTKSEQYTFGQEVGFQIGAEGVWSASGKVSFEQMRGSSESTFKSATEKVEYGGGSQLVEAGQALEIEFLYEENTYEGKAVTTSEITGDLGAYIGPIYYFDLDDTAFESARGGRSSSPTTRLYSAYEILKPRMNKGAMMNGMSIYVPTREDQYWMTSNEINNNVLFDDKAKKAYLKDHVSPFKGVSGVQIVQRIKDAKTGQVLSYKPVKTF

SEQ ID NO: 221 - protein, 296 aa, Artificial Sequence
  synthetic
MAENTPASEPTIQAYGKAGMNFGEFTRWVLERDGHLKKGAYTEIQDLKTTGTNLKSLDKFPLINDTNMDRNMEVPKKGYERTDSLTVTKSEQYTFGQEVGFQIGAEGVWSASGKVSFEQMRGSSESTFKSATEKVEYGGGSQLVEAGQALEIEFLYEENTYEGKAVTTSEITGDLGAYIGPIYYFDLDDTAFESARGGRSSSPTTRLYSAYEILKPRMNKGAMMNGMSIYVPTREDQYWMTSNEINNNVLFDDKAKKAYLKDHVSPFKGVSGVQIVQRIKDAKTGQVLSYKPVKTF

SEQ ID NO: 222 - protein, 662 aa, Unknown
  Unknown organism from environmental sample
MNSNDKSEQNVINASSDQAVSTNSVRYPLASDQINTLQNINYKDYLRMSEEQNVDFLTNTEVFASTQDSIKLGMNIVGQILTSLGIPFVKPIISFYTVIIGLLWPSSGKNPWKFFMEQVEELIDQKIEEYARNKALAELEGLGANFELYRVALEEWKENPNISRTTRDVRTLFEILDVLFTQYMPSFKVADHEVPLLTVYVQAASLHLLLLRDVSIFGEEWGLSTTTINNYYKRQMSLTAQYSDHCVKWYNTGLDRLKGSDAKSWLNYHRFRREMTLTVLDLVALYPNYDTRIYPIQTVAQLTREVYSDPIGYNPENGSSWSRPWTNVINTPLFDTLERDSIRSPHLFEILKSIEITTMKSLLPLNDKEYINYWSGHSLTYTNIDGVTTNKIDYGYVDNSEKNKFDLVNEDIVQINTTAACLSNSYGAIYGVPLSSFVKLKRDGATLNTAVYSKTHTTSSSSTQEYDSENEIPSESGTIVSHKLSDITFSSFSPANGIRFSFPIFSWVHMSADLDNFVFPDKITQLPLTKSHEISDNVEIVNSDYVGGSVLKVNRKTLENNTVNTIQFSLPLSESTRYKVRVRYASTGDGFMSMPEVLAADKPFNATMKEESDLKYDSFRYITLGSIITPATNNRYSLYLPNPNGANYTIYIDKIELIPLDK

SEQ ID NO: 223 - protein, 583 aa, Pedobacter sp.
MSFKPLANQSYYLIAKHSAKALGFANTNLGIGLIQMKFDPDNKQQQFRFDFGNNFHWILMEPYKERFLAIHNSSKDDGVRPISWHWEPNKANLHFRFIPAGDGYYRIMNLNSGKYLDVYGLSTADNAEVVQHRLTTTDNQLFKPVAVINQPVDDSPASFIEINEMAHTAALGLIGVLPEVGGGLKAIVEHFWSKEDKLANLWEQMKVYVDARIRELIKESQLKQLKEMLEGQLKSLAEINTESGLKGSKIDDVILSIVRREPHFLHQSKEVLPYLVGLGTIMIALRNLMVTKYKDLYGVEATDAVKANNLRKLRASIKEYSAEVEKSRKAVMDFRMAQVKDRRDYTIEGRGKLPRDTHVSEAVDTYDGWKMEWRFTSNRIGDEDYKQLAGNAAEQRKNQVRVQYGTELDEFLLPAKLWKYFDPEHAKYEETITSKTTGSFGGLYKTTEFKGKENGVISKIKIYAEAGGLCGLEVFYDGSETSEGLKGKAGSSVETLTVDNGEYINHVTGYANRYVDGLWFSTQKASTAGGGSIGNTYFTADLSDGFNPKLVNISGYHSAQKIEQLSFHWQYKDFPLSKYIPKA

SEQ ID NO: 224 - protein, 1271 aa, Bacillus sp.
MIGGQFMNQYYQSNEMEVLDVGVDRSRYPYAQNPGIELQSMNYRDWMDMCTSNESGELFNSVRNGVIIGTAITSYVLSVSFPIASAAVGIISVLLPLMWPEEAGDPGTTQAQFTWDQLMRAVEGIVNESISNLVRNQAINTLAKLQSSIKDYQQAVCNLKNSSPDDPSYEQYKADVRREFNDAEDQAKLAIIDLKASGYEVLLLASYVEAANLHLLLLRDVVQHGESWGFSALEVQQYYSNTSSIGNPGMLQLLAIYTEYCVKWYNSGLQKQWNTNNWNTFNDFRRDMTVMVLDVVSFWPTYDPKYYPLPTKSQLTRTLYTSLIQGKAVPTSINDLENYLVAPPSLFRWLRKIDFYLAKPTTPEPKYLTGMKQFYQYTLLNNLEDSGLQGSSTSDVSSLTVPTPTSQDDIWSIIGTYDPFSPAGGYIGGFKFRLTKSADQDIIIAGDIGTKNYLGFPCKPSNSYACDPCNPNDSCTAGITDTANPCNTVDLYSHRCSYMGSYFGNYAIKSLWYASFGWTHVSADANNLLDTEKITQIPAVKANSITAAYGVIKGSGSTGGDLVKLFHGFESGQMRLYVTVPKGSEISYRVRIRYACDVGSRVSVSAVGSTASFTANSTTTNMSNLTYNDFGYLETVLFKNVTPDRDYVGEVHINAQGYSAGSFIVDKVEFIPTTESLTEYETKQNLENARKAVNALFTNDMKNSLRVDVTDYDVDQAANKVDCLSDDIFPKEKMMLRDQVKHAKRLSQERNLLNYGDFKSQNWSDENGWRVSNNVTVQSNYPISKGRYLNMPGARSIDFSNKIYPTYAYQKVDEFKLKPYTRYLVRGFVGNSTDLELFVTRYGQEVHDQMNIPFSPMNTYSQTATISDGCGMGQLSNYSMSSDPCQTIAYPSNPFGMPMSSTKGLCEDKQHFVFHIDVGEIDQRVNLGIGVGFKIASPSGRAELDNIEVIEANPLTGEALARVKKREQKWKREMEQRCALTEKTVSTATQAVNSLFTNAQKNRLKAKTTMLDIQNAETKVKTIPYVYNSEFEELPGMNDAIFQVLQSDVYTASSLYAQRNVIRNGDFSNELSNWHATAGAGVEQRDRNPHVLVISQWDVNVSQEVCVQPEHGYVLRVTARKEGSGKGYVTLSDCTPENTETVTFTSDETVPNSRIIAPSRRTIEPTACDSIRYNESFGSVSDTNMMSYTTENASREVCSCGCNNTIHTPSTSYQAKAYTSNSSVPNMTGPTPGYITKTIELFPETNRLRIEMGETDGTFLVESIELICMEE

SEQ ID NO: 225 - protein, 667 aa, Artificial Sequence
  synthetic
MNQYYQSNEMEVLDVGVDRSRYPYAQNPGIELQSMNYRDWMDMCTSNESGELFNSVRNGVIIGTAITSYVLSVSFPIASAAVGIISVLLPLMWPEEAGDPGTTQAQFTWDQLMRAVEGIVNESISNLVRNQAINTLAKLQSSIKDYQQAVCNLKNSSPDDPSYEQYKADVRREFNDAEDQAKLAIIDLKASGYEVLLLASYVEAANLHLLLLRDVVQHGESWGFSALEVQQYYSNTSSIGNPGMLQLLAIYTEYCVKWYNSGLQKQWNTNNWNTFNDFRRDMTVMVLDVVSFWPTYDPKYYPLPTKSQLTRTLYTSLIQGKAVPTSINDLENYLVAPPSLFRWLRKIDFYLAKPTTPEPKYLTGMKQFYQYTLLNNLEDSGLQGSSTSDVSSLTVPTPTSQDDIWSIIGTYDPFSPAGGYIGGFKFRLTKSADQDIIIAGDIGTKNYLGFPCKPSNSYACDPCNPNDSCTAGITDTANPCNTVDLYSHRCSYMGSYFGNYAIKSLWYASFGWTHVSADANNLLDTEKITQIPAVKANSITAAYGVIKGSGSTGGDLVKLFHGFESGQMRLYVTVPKGSEISYRVRIRYACDVGSRVSVSAVGSTASFTANSTTTNMSNLTYNDFGYLETVLFKNVTPDRDYVGEVHINAQGYSAGSFIVDKVEFIPT

SEQ ID NO: 226 - protein, 1265 aa, Artificial Sequence
  synthetic
MNQYYQSNEMEVLDVGVDRSRYPYAQNPGIELQSMNYRDWMDMCTSNESGELFNSVRNGVIIGTAITSYVLSVSFPIASAAVGIISVLLPLMWPEEAGDPGTTQAQFTWDQLMRAVEGIVNESISNLVRNQAINTLAKLQSSIKDYQQAVCNLKNSSPDDPSYEQYKADVRREFNDAEDQAKLAIIDLKASGYEVLLLASYVEAANLHLLLLRDVVQHGESWGFSALEVQQYYSNTSSIGNPGMLQLLAIYTEYCVKWYNSGLQKQWNTNNWNTFNDFRRDMTVMVLDVVSFWPTYDPKYYPLPTKSQLTRTLYTSLIQGKAVPTSINDLENYLVAPPSLFRWLRKIDFYLAKPTTPEPKYLTGMKQFYQYTLLNNLEDSGLQGSSTSDVSSLTVPTPTSQDDIWSIIGTYDPFSPAGGYIGGFKFRLTKSADQDIIIAGDIGTKNYLGFPCKPSNSYACDPCNPNDSCTAGITDTANPCNTVDLYSHRCSYMGSYFGNYAIKSLWYASFGWTHVSADANNLLDTEKITQIPAVKANSITAAYGVIKGSGSTGGDLVKLFHGFESGQMRLYVTVPKGSEISYRVRIRYACDVGSRVSVSAVGSTASFTANSTTTNMSNLTYNDFGYLETVLFKNVTPDRDYVGEVHINAQGYSAGSFIVDKVEFIPTTESLTEYETKQNLENARKAVNALFTNDMKNSLRVDVTDYDVDQAANKVDCLSDDIFPKEKMMLRDQVKHAKRLSQERNLLNYGDFKSQNWSDENGWRVSNNVTVQSNYPISKGRYLNMPGARSIDFSNKIYPTYAYQKVDEFKLKPYTRYLVRGFVGNSTDLELFVTRYGQEVHDQMNIPFSPMNTYSQTATISDGCGMGQLSNYSMSSDPCQTIAYPSNPFGMPMSSTKGLCEDKQHFVFHIDVGEIDQRVNLGIGVGFKIASPSGRAELDNIEVIEANPLTGEALARVKKREQKWKREMEQRCALTEKTVSTATQAVNSLFTNAQKNRLKAKTTMLDIQNAETKVKTIPYVYNSEFEELPGMNDAIFQVLQSDVYTASSLYAQRNVIRNGDFSNELSNWHATAGAGVEQRDRNPHVLVISQWDVNVSQEVCVQPEHGYVLRVTARKEGSGKGYVTLSDCTPENTETVTFTSDETVPNSRIIAPSRRTIEPTACDSIRYNESFGSVSDTNMMSYTTENASREVCSCGCNNTIHTPSTSYQAKAYTSNSSVPNMTGPTPGYITKTIELFPETNRLRIEMGETDGTFLVESIELICMEE

SEQ ID NO: 227 - protein, 195 aa, Bacillus sp.
VKSLHTKKYGNNQEWRQIGGPNDILLEGEVQSAATIEYTESVHANLSFCGMVHIPHGFVYIPNSARQLAYSLSGLFVTNETSQRTIVVDDCGPVDVTLNVLKVVGNIPYIATAMVQGDSGETFGSSPKQKNQVHLSYTDSIQVDTVLKLSVASLPGYSIQEDSIKISDFQVTPVQDQGSNLLRFTGTFSFQNIPQ

SEQ ID NO: 228 - protein, 537 aa, Unknown
  Unknown organism from environmental sample
MEHTQTSQSIIIKKALEKIKDPETQSAVKSLIGDGIKQAYEDTKSGDFTRTIRTLTLGALTLIPYGGAFVSQILGVLWETKETNPLKVLEDQIKDLEGKVKALNSSHLKAKYDVLMKELQRFEDGMNHQPGTASFYDAGSIEQTNRMSAQLINSKFKDLIKACEIKILRTEELPIYTLVATAHLVFLQIIQYNWKSTKLRIDQHSYDLYYKDDIQKLPGEYLNHVMNTYKTKKDEYQKEMQDVVKSAPISYTSDDGKLNLKVMQDKYDELYKKFEADGRIAIWSGQVDTMNKLRKAINDYITLMTKKNKYYYETAGNEAFQLLALGKWVQENGNRHFVDNAGQKKTNWLQLGDKWYYLNPEKNDIKNSTGVTFKPGERVTGKIDIKGKIYFFKSDTGEMRTGWVQDGDKYYYVSPANSFKNWNNDTFNEGDLVTGWLQGGNETYYLSPADGSKNGDDKTFGKGEMMTGWVAVAHDGKSTSTDPGAYGGAWYYLDNPEGNKNYKGTLGRMLHDEKATVKNKDGTFKEHSFNENGTWAW

SEQ ID NO: 229 - protein, 1298 aa, Bacillus sp.
LLMNQNYSNSECEITDGRSGCGRPRSPFTNVLNSEWQNMNNKDGSIMYSNQENSYSGLDAREIFERVTTAASIVVGMAFPPAGAVLGLAAVLIPLYWPEDKEDPEIVWKGLMEYAAKLVDQKICEKAQEDAVNHLAGIKNLYCRYQEALCDLRGNPENPQLQAEVLGRWRAADSSFIEAMPQFRSSSCVEQLLPVYAQAGNLHLLLLRDGVNFGESWGMDSVTIATNYQILRKNIGDYTDHCVNTIDTWLQVLSESKATLTDCARYPWVQFNQSTGYPDYPQANQCNTTPTVNVDYCLSTKGWDKGGRNSATEYEGVEAWNIYNNFRRDMQLMVLDTVSMWPTYDPYRYKYPVKSQLTREIYTPIRGTTYRSNSDENTVSAIEYRMIPRPDLFTWLNQLSFHLENTTTDPEEVWIAGELITGLQTTIQTTFGNPEKLSLIGYEGSITRTWNPSYYDITWVDTQQWFEPRWIQFWSGDAGTGWTNQGTLGTILEKKPTFTYRLNYPKHGPYACIYEPSKRAHTLPEISLIDMESIGNQCSQPIGQRCQIQAPFTNIASHRLSWFQYEHIRDDSPFGYPEWKQLGALALGWTHTSVDRNNTIATDRITQIPAVKASSIGSSSEVIKGPGSTGGNLVQISNNSFLELRLTGQSQKGYLLRLRYACQDTGALSIYRATKSPDGMWDYDFIEESVNVPSTNYRGSLQSNAFGYLTITEPLDASTFVEWKMEFFYEGDTPIIIDKIEFIPIEGLVEKYEANQNLEKARKSVNALFTSDAKNALKLNSTDYAVDQASNLVECVSDDFHAQEKMILLDQVKVAKRLSQARNLLNYGDFESPDWSGENGWKTSHHVHVASNNPIFKGRYLHMPGATNSQFSNNIYPTYIYQKVDESKLKSYTRYLVRGFVGNSKALELLAERYGKNIHVEMDVPNDIQYTLPMNDCGGFDRCQPVSYQTASPHTCICKDTTVAHTDCQCKDKGNRTSTGMYTNGHHSHKSCGCKGPHVFSYHIDTGCVDLEENLGLWFALKIASENGIANIDNLEIIEAQPLTGEALARVKKREHKWKQAMVQKRLQTEKSVQAAQGAIQNLFTNAQQNRLKFETLFPQIVNVEKLVQQIPYVHHPFLSGALPAVPGMNFDMFQQLSAKIGNAYALYEQRNLVRNGTFSSGTGSWHVTEGVEVQPLQNTFVLALSEWSHEASQQLRIDPDRGYVLRVTARKEGIGKGTVTMSDCASYTETLTYTSCDYNTTGTQTMTSGTLSEFVTKTLEIFPDTDRIRIDIGETEGTFKVESVELICMEQMEDPMY

SEQ ID NO: 230 - protein, 1296 aa, Artificial Sequence
  synthetic
MNQNYSNSECEITDGRSGCGRPRSPFTNVLNSEWQNMNNKDGSIMYSNQENSYSGLDAREIFERVTTAASIVVGMAFPPAGAVLGLAAVLIPLYWPEDKEDPEIVWKGLMEYAAKLVDQKICEKAQEDAVNHLAGIKNLYCRYQEALCDLRGNPENPQLQAEVLGRWRAADSSFIEAMPQFRSSSCVEQLLPVYAQAGNLHLLLLRDGVNFGESWGMDSVTIATNYQILRKNIGDYTDHCVNTIDTWLQVLSESKATLTDCARYPWVQFNQSTGYPDYPQANQCNTTPTVNVDYCLSTKGWDKGGRNSATEYEGVEAWNIYNNFRRDMQLMVLDTVSMWPTYDPYRYKYPVKSQLTREIYTPIRGTTYRSNSDENTVSAIEYRMIPRPDLFTWLNQLSFHLENTTTDPEEVWIAGELITGLQTTIQTTFGNPEKLSLIGYEGSITRTWNPSYYDITWVDTQQWFEPRWIQFWSGDAGTGWTNQGTLGTILEKKPTFTYRLNYPKHGPYACIYEPSKRAHTLPEISLIDMESIGNQCSQPIGQRCQIQAPFTNIASHRLSWFQYEHIRDDSPFGYPEWKQLGALALGWTHTSVDRNNTIATDRITQIPAVKASSIGSSSEVIKGPGSTGGNLVQISNNSFLELRLTGQSQKGYLLRLRYACQDTGALSIYRATKSPDGMWDYDFIEESVNVPSTNYRGSLQSNAFGYLTITEPLDASTFVEWKMEFFYEGDTPIIIDKIEFIPIEGLVEKYEANQNLEKARKSVNALFTSDAKNALKLNSTDYAVDQASNLVECVSDDFHAQEKMILLDQVKVAKRLSQARNLLNYGDFESPDWSGENGWKTSHHVHVASNNPIFKGRYLHMPGATNSQFSNNIYPTYIYQKVDESKLKSYTRYLVRGFVGNSKALELLAERYGKNIHVEMDVPNDIQYTLPMNDCGGFDRCQPVSYQTASPHTCICKDTTVAHTDCQCKDKGNRTSTGMYTNGHHSHKSCGCKGPHVFSYHIDTGCVDLEENLGLWFALKIASENGIANIDNLEIIEAQPLTGEALARVKKREHKWKQAMVQKRLQTEKSVQAAQGAIQNLFTNAQQNRLKFETLFPQIVNVEKLVQQIPYVHHPFLSGALPAVPGMNFDMFQQLSAKIGNAYALYEQRNLVRNGTFSSGTGSWHVTEGVEVQPLQNTFVLALSEWSHEASQQLRIDPDRGYVLRVTARKEGIGKGTVTMSDCASYTETLTYTSCDYNTTGTQTMTSGTLSEFVTKTLEIFPDTDRIRIDIGETEGTFKVESVELICMEQMEDPMY

SEQ ID NO: 231 - protein, 743 aa, Artificial Sequence
  synthetic
MNQNYSNSECEITDGRSGCGRPRSPFTNVLNSEWQNMNNKDGSIMYSNQENSYSGLDAREIFERVTTAASIVVGMAFPPAGAVLGLAAVLIPLYWPEDKEDPEIVWKGLMEYAAKLVDQKICEKAQEDAVNHLAGIKNLYCRYQEALCDLRGNPENPQLQAEVLGRWRAADSSFIEAMPQFRSSSCVEQLLPVYAQAGNLHLLLLRDGVNFGESWGMDSVTIATNYQILRKNIGDYTDHCVNTIDTWLQVLSESKATLTDCARYPWVQFNQSTGYPDYPQANQCNTTPTVNVDYCLSTKGWDKGGRNSATEYEGVEAWNIYNNFRRDMQLMVLDTVSMWPTYDPYRYKYPVKSQLTREIYTPIRGTTYRSNSDENTVSAIEYRMIPRPDLFTWLNQLSFHLENTTTDPEEVWIAGELITGLQTTIQTTFGNPEKLSLIGYEGSITRTWNPSYYDITWVDTQQWFEPRWIQFWSGDAGTGWTNQGTLGTILEKKPTFTYRLNYPKHGPYACIYEPSKRAHTLPEISLIDMESIGNQCSQPIGQRCQIQAPFTNIASHRLSWFQYEHIRDDSPFGYPEWKQLGALALGWTHTSVDRNNTIATDRITQIPAVKASSIGSSSEVIKGPGSTGGNLVQISNNSFLELRLTGQSQKGYLLRLRYACQDTGALSIYRATKSPDGMWDYDFIEESVNVPSTNYRGSLQSNAFGYLTITEPLDASTFVEWKMEFFYEGDTPIIIDKIEFIPI

SEQ ID NO: 232 - protein, 312 aa, Bacillus sp.
LCIISGNPANAQINTSSGIIPEQSSLQKLSSYQTQGSQVVNIDQVVRKAIPGYARFVNGLGETSKVGVHINDVKFLDVEEKYIDPDYPIQSKLIGKGPEKLVQSIEEYIYNEHPSAELTKSHTFQHGISNTSTITNSVTHNHKAGVKFTYKAKVDLLVESAEVGGEVSYEYTNSNQNGTSDSKTFTKTFSSTASAKLPPNSKGKLVSSVYTTPATYEIKSRSFFTGSVQFSYVLANDPGTLRTTTVSLHELFSRTDEQTVDDIANNYHMWASTFWKPENGQPVNALLFEGKSILNIDETYRTETRLTDIKGI

SEQ ID NO: 233 - protein, 312 aa, Artificial Sequence
  synthetic
MCIISGNPANAQINTSSGIIPEQSSLQKLSSYQTQGSQVVNIDQVVRKAIPGYARFVNGLGETSKVGVHINDVKFLDVEEKYIDPDYPIQSKLIGKGPEKLVQSIEEYIYNEHPSAELTKSHTFQHGISNTSTITNSVTHNHKAGVKFTYKAKVDLLVESAEVGGEVSYEYTNSNQNGTSDSKTFTKTFSSTASAKLPPNSKGKLVSSVYTTPATYEIKSRSFFTGSVQFSYVLANDPGTLRTTTVSLHELFSRTDEQTVDDIANNYHMWASTFWKPENGQPVNALLFEGKSILNIDETYRTETRLTDIKGI

SEQ ID NO: 234 - protein, 760 aa, Unknown
  Unknown organism from environmental sample
MNPYQNKRECEIIDTPEHFDTVSNKYPYANDPNIAMQNTNYKNLMNDYENITSSSLSGILTSIGMFNKVLMLTGVLGVTPMVINIILDMVRLIDMGTGDDLLVHTEQLIQQTLATQYRSAAVGAIYGISRAYENYLMFFKQWERNRTPQNGQQVESAFTTVNTLCITALASQASLSRRGFETLLLPNYALAANFHLLLLRDAVIYRNSWLSSNISTRSVNLTILRTTINEYSNHCRHWYQDGLNRFNRGSSFTMTEWKSFNAYRRDMTLSVLDFLSVFPTYDPIQFPMATNVELTRVVYTDPIRMTGLRAAAPTFNRMENLVNSASRASFLNQMNIYTSFYFRPHNIPRYYWAGNRNFLSNGNSNFYGYDSDRRTVFNVSNMDIFRVNMTGHIGGSFNDDYRGIHRAEFIGTNTQNNQRTSLLYNVEIPSSHFRFENHTVFLPGESGLEPNERDYTHRLFQVMNEVSVNNNARGVVFLHAWTHRSLRRGNRLKADHIMQIPAVKTISTSGNCAVISYAGESMMKLDNLTTKLSYKLTAEDSEASNTRFIVRIRYASMNNNRLNLILNGTQIASLNVKDTMQNGGSLTDLQYENFKYATFSGNFKMGSQSILGIFKEISNADFILDKIELIPIHFMPLLEQKQSYNNYGQNMDTTYQSSYDNYNQNSNGMYDDTYYPNNNDSYNQSYPDTYDSGYNNNQNTSYNYDPEYNTYNQNMENTYENYNPDNNNYNQYPNNMYPKEYNNNYNQNSGCTCNQGYNNN

SEQ ID NO: 235 - protein, 632 aa, Artificial Sequence
  synthetic
MNPYQNKRECEIIDTPEHFDTVSNKYPYANDPNIAMQNTNYKNLMNDYENITSSSLSGILTSIGMFNKVLMLTGVLGVTPMVINIILDMVRLIDMGTGDDLLVHTEQLIQQTLATQYRSAAVGAIYGISRAYENYLMFFKQWERNRTPQNGQQVESAFTTVNTLCITALASQASLSRRGFETLLLPNYALAANFHLLLLRDAVIYRNSWLSSNISTRSVNLTILRTTINEYSNHCRHWYQDGLNRFNRGSSFTMTEWKSFNAYRRDMTLSVLDFLSVFPTYDPIQFPMATNVELTRVVYTDPIRMTGLRAAAPTFNRMENLVNSASRASFLNQMNIYTSFYFRPHNIPRYYWAGNRNFLSNGNSNFYGYDSDRRTVFNVSNMDIFRVNMTGHIGGSFNDDYRGIHRAEFIGTNTQNNQRTSLLYNVEIPSSHFRFENHTVFLPGESGLEPNERDYTHRLFQVMNEVSVNNNARGVVFLHAWTHRSLRRGNRLKADHIMQIPAVKTISTSGNCAVISYAGESMMKLDNLTTKLSYKLTAEDSEASNTRFIVRIRYASMNNNRLNLILNGTQIASLNVKDTMQNGGSLTDLQYENFKYATFSGNFKMGSQSILGIFKEISNADFILDKIELIPI

SEQ ID NO: 236 - protein, 376 aa, Bacillus sp.
MRKKTVTSVTATIMSLGILGLGDMPSAYALENTPIYYTDFGQENNQISEQYKRDTERFLNGWFQYGNTAQTIGKINDSKASDEIIMAQNGTLDNTQGSTPQKFTTISESVKQIDSVTTTKGLEGSFEAGLEASFESEQSIGVAKAKESLKATMKVGMKKSESQANTQTNERMITIPSQNIEVPAGKKYQIRYIVKKAEMSGELSQVKEITRGTSNDGLINSPRVSYAIDVSKPGTNAIDSMYWEDIYNATPYQFFNRLDEIKNKFIKGGPQQEFMDVYLQRHNVGKDRVVFQIDGMDNQAGNNDNGRYRMGEQGLLGNIYLNHNLKKVYVNSENIPFTASIGLDYVIQLVDITNGDDTLLKETQPSTVGQTAPKFK

SEQ ID NO: 237 - protein, 348 aa, Artificial Sequence
  synthetic
MLENTPIYYTDFGQENNQISEQYKRDTERFLNGWFQYGNTAQTIGKINDSKASDEIIMAQNGTLDNTQGSTPQKFTTISESVKQIDSVTTTKGLEGSFEAGLEASFESEQSIGVAKAKESLKATMKVGMKKSESQANTQTNERMITIPSQNIEVPAGKKYQIRYIVKKAEMSGELSQVKEITRGTSNDGLINSPRVSYAIDVSKPGTNAIDSMYWEDIYNATPYQFFNRLDEIKNKFIKGGPQQEFMDVYLQRHNVGKDRVVFQIDGMDNQAGNNDNGRYRMGEQGLLGNIYLNHNLKKVYVNSENIPFTASIGLDYVIQLVDITNGDDTLLKETQPSTVGQTAPKFK

SEQ ID NO: 238 - protein, 1295 aa, Bacillus sp.
MNQNCNHNKYEILDSGSVSCQPKYPLAQAPGSEFQQMNYKDWMNMCKRGQPGGLFSDVPTVIRNSLIIGTGVAWAYLGAVFPGASVVAGILNVLIPYLWPESAGSPGTPEAQFSWEQLMTAAETLINKHLTEYVRNRAITTVEGLQRVLNLYRDAVCDWRRTPSAANQSRVLDNFRITNSQFEAAMPAFTQRDFETVLLNSYAQMANLHLLFLQEGIRYGKDWEMSSEPGEELDDLYYQLLRRTAEYTDHCVRWYNVALQKQYADNPYDWNKFNNFRLNMTLTILDIIALWPTYDPKLYPVLTKAQLTRTVYTPMLGYTLNPLEPAVPIAIAEHNIVDNALQLFTWIRELEINGNNRWSGEPDIYGRKLIQQYTLSNAVFERGFQGQHGGDRTERLVVPSPQSYDDIWKIQSAGSPHLDGAYTYVNGWTFSFTKSQDQTVMSPNNFSDLSGLPCLSSSSCTCNSDPNTPCSIKNLDTTIPCNDKTLYSHRLSYFGAGQDIAAYGYKTLSYFGYGWTHISADANNLIDIEKITQIPAVKGYQLTDPGRVVRGPGSTGGDLVSLPTGGSITVKVTIPESVSTATQWYEIRMRYANIEDTLLRFSVKSDYEEWSRVQQLPTTYLGEELNFQAFAYRNLPAGIASYADKYILELTLENYGSPNDIDINTNLLIDKIEFIPIEGSLEAYQADQHVEKARKAVNALFTGDAKNALKLNVTDYAVDQAANLVECVSEDFHAQEKMIMLDQVKFAKRLSQARNLLNYGDFESPDWSGENGWKTSPHVHVASDNPIFKGRYLHMPGANQPQMSDTVYPTYLYQKVDESKLKSYTRYHVRGFVGNSKDLALLVERYGKEVHVEMDVPNDIRYTLPMNECGGFDRCDHSSYQAGTDSHTCTCTNPARMDVECQCKDKANRTVSDMYTNAYPDSGIMYPDGYHAHKSCGCGNNTGYQNGKHAHKSCGCKDPHVFSFHIDTGCVDMEENVGLLFALKIASTNGVANIDNLEIIEGQPLTGEALARVKKREHKWKQEMEQKRCKTEEAVQAAQTAINTLFTNTQYNRLKFETLFPHILHADELVQRIPYVYHPFLLGAYPDVPGMNYDIFQQLSALVNQARGLYDMRNLVRNGTFSAGIGNWQVTDGVATQPEGNTSVLILREWSDKAIQHLRIHAERGYVLRVTARKEGNGDGYVVIHDCDNQQEKLTFTACDYTTMGSSTGTQTMMTSPTNCMPCNSTTWKEEMKALVPMLSGYVTKTAEIFPDTDRIHIEIGETEGTFKIESVELICMEHMEEHAYDLVKKNWNIN

SEQ ID NO: 239 - protein, 677 aa, Artificial Sequence
  synthetic
MNQNCNHNKYEILDSGSVSCQPKYPLAQAPGSEFQQMNYKDWMNMCKRGQPGGLFSDVPTVIRNSLIIGTGVAWAYLGAVFPGASVVAGILNVLIPYLWPESAGSPGTPEAQFSWEQLMTAAETLINKHLTEYVRNRAITTVEGLQRVLNLYRDAVCDWRRTPSAANQSRVLDNFRITNSQFEAAMPAFTQRDFETVLLNSYAQMANLHLLFLQEGIRYGKDWEMSSEPGEELDDLYYQLLRRTAEYTDHCVRWYNVALQKQYADNPYDWNKFNNFRLNMTLTILDIIALWPTYDPKLYPVLTKAQLTRTVYTPMLGYTLNPLEPAVPIAIAEHNIVDNALQLFTWIRELEINGNNRWSGEPDIYGRKLIQQYTLSNAVFERGFQGQHGGDRTERLVVPSPQSYDDIWKIQSAGSPHLDGAYTYVNGWTFSFTKSQDQTVMSPNNFSDLSGLPCLSSSSCTCNSDPNTPCSIKNLDTTIPCNDKTLYSHRLSYFGAGQDIAAYGYKTLSYFGYGWTHISADANNLIDIEKITQIPAVKGYQLTDPGRVVRGPGSTGGDLVSLPTGGSITVKVTIPESVSTATQWYEIRMRYANIEDTLLRFSVKSDYEEWSRVQQLPTTYLGEELNFQAFAYRNLPAGIASYADKYILELTLENYGSPNDIDINTNLLIDKIEFIPI

SEQ ID NO: 240 - protein, 322 aa, Unknown
  Unknown organism from environmental sample
MAITDVESAAKAGAEWLVTTRNGAIPGTIRTALYPYVVQNPIALPNQTYFETVPVQKASTVQVLTNNTSLTQSQTVHFSEKTIETTSSSTTEGYKMGSNIISTTKFSYRIKIFAASIGFEQTFPMAITGEYNHSSTQTISLTTERLWAVTQPVNVPPYSQIIATLTIMGADVQIPMTLHANILGQGISNAPTGITYPEQFTKTDYQHTNGSKYYQNYTSGFLYQPSWPDMPASFTGWSGNALILKGASTTSTGPGLYATVRFDQTPLPGFEQFSESKSWYSNEVLLRDGTIKKIPDLDPSNGRAIQPKAPKPILVSSLEINH

SEQ ID NO: 241 - protein, 171 aa, Unknown
  Unknown organism from environmental sample
MGTARRIGTAALALAAAGALSLGAAGSASAADTARTAKGAKAAEAPALASAARSVNVSFSNWTGCTLTREEWGLSHGIWTAQPPVRIYDQGTGSWASESNGFATGTEGYARFFSENCADPVLNGRLVRVHWNDPYAGSNSYDSSGTDLKFYVSRSGGSGNNASVQFSAWGR

SEQ ID NO: 242 - protein, 142 aa, Artificial Sequence
  synthetic
MADTARTAKGAKAAEAPALASAARSVNVSFSNWTGCTLTREEWGLSHGIWTAQPPVRIYDQGTGSWASESNGFATGTEGYARFFSENCADPVLNGRLVRVHWNDPYAGSNSYDSSGTDLKFYVSRSGGSGNNASVQFSAWGR

SEQ ID NO: 243 - protein, 695 aa, Erwinia sp.
VEYIMENEKISKTRRNLLVGGGIVATGSLLSGSLFPQLALAELANTSAITPLAQSVGYALRGINKDEVKVPYGQGNQVITLKEMSEAAANGFSNLHGALDQLFKDAPVLAMSSLVESLILKLAGGFLGGIAGPLFSGAITGLFSYFNNLFTTSKPSIEEEIRRITGQMIDDNNYGILKSRMQGLTTVCGAFNTSLKKFLDQQTRSDLKGEVLNRFSNLIGHLRIEMPLFLNISNGIGYLFYMQAAALGLISYTQLLSNRKTLNLDDDYYELQFDDLRNDATSWMKVSQENLIKRYHDTGFKTNEVIRFCRNVYTGGYAMLLSAYRASFSLEAGVELNIRNTAELYSDAPTDVANGSFTPVLAKINKDIHLRSSLLADIGMMGHLDNVLAINHGYFDGTGQYRRTYFESCYNPSSHPKVRYANRDFNLNPFQPGGENIDGGTNINTMIINMSTSASGARLYYLRMLTPTGALQPTNNANESGLYNINIPNYYISGLVVGGYHNGKQCTADAGWGLRVDCAIFRHYDGLETKRVLEANEAGEIKKGIAYELDFNGGYVFNEDGAPHNNVYSDILIGKNIITSGENHPIKMNFTLIADESVNMTWQNHIKILIFSSELQGISRLMIRDDNDNRLFSTGVTNFKKLPNFEIKSLAGKPFYLYELQVATAAYSGPLNQIRIELQPQNSDCHFASMTLITM

SEQ ID NO: 244 - protein, 585 aa, Artificial Sequence
  synthetic
MSSLVESLILKLAGGFLGGIAGPLFSGAITGLFSYFNNLFTTSKPSIEEEIRRITGQMIDDNNYGILKSRMQGLTTVCGAFNTSLKKFLDQQTRSDLKGEVLNRFSNLIGHLRIEMPLFLNISNGIGYLFYMQAAALGLISYTQLLSNRKTLNLDDDYYELQFDDLRNDATSWMKVSQENLIKRYHDTGFKTNEVIRFCRNVYTGGYAMLLSAYRASFSLEAGVELNIRNTAELYSDAPTDVANGSFTPVLAKINKDIHLRSSLLADIGMMGHLDNVLAINHGYFDGTGQYRRTYFESCYNPSSHPKVRYANRDFNLNPFQPGGENIDGGTNINTMIINMSTSASGARLYYLRMLTPTGALQPTNNANESGLYNINIPNYYISGLVVGGYHNGKQCTADAGWGLRVDCAIFRHYDGLETKRVLEANEAGEIKKGIAYELDFNGGYVFNEDGAPHNNVYSDILIGKNIITSGENHPIKMNFTLIADESVNMTWQNHIKILIFSSELQGISRLMIRDDNDNRLFSTGVTNFKKLPNFEIKSLAGKPFYLYELQVATAAYSGPLNQIRIELQPQNSDCHFASMTLITM

SEQ ID NO: 245 - protein, 691 aa, Artificial Sequence
  synthetic
MENEKISKTRRNLLVGGGIVATGSLLSGSLFPQLALAELANTSAITPLAQSVGYALRGINKDEVKVPYGQGNQVITLKEMSEAAANGFSNLHGALDQLFKDAPVLAMSSLVESLILKLAGGFLGGIAGPLFSGAITGLFSYFNNLFTTSKPSIEEEIRRITGQMIDDNNYGILKSRMQGLTTVCGAFNTSLKKFLDQQTRSDLKGEVLNRFSNLIGHLRIEMPLFLNISNGIGYLFYMQAAALGLISYTQLLSNRKTLNLDDDYYELQFDDLRNDATSWMKVSQENLIKRYHDTGFKTNEVIRFCRNVYTGGYAMLLSAYRASFSLEAGVELNIRNTAELYSDAPTDVANGSFTPVLAKINKDIHLRSSLLADIGMMGHLDNVLAINHGYFDGTGQYRRTYFESCYNPSSHPKVRYANRDFNLNPFQPGGENIDGGTNINTMIINMSTSASGARLYYLRMLTPTGALQPTNNANESGLYNINIPNYYISGLVVGGYHNGKQCTADAGWGLRVDCAIFRHYDGLETKRVLEANEAGEIKKGIAYELDFNGGYVFNEDGAPHNNVYSDILIGKNIITSGENHPIKMNFTLIADESVNMTWQNHIKILIFSSELQGISRLMIRDDNDNRLFSTGVTNFKKLPNFEIKSLAGKPFYLYELQVATAAYSGPLNQIRIELQPQNSDCHFASMTLITM

SEQ ID NO: 246 - protein, 296 aa, Unknown
  Unknown organism from environmental sample
MAIVDLDAYLTALAKKVFPIPQMIKGVFTSELSIENAESYGFEIKNSKPQGTMFMGESVLKNDTNETQLIHSDSFTKTITDSVTLSVTNGITTGVNISIGGKVFGMGVDTSMSFEVSTSTTREQTSTEGVAYTVPSQTVSVPARKTYYVYTALQRSQLEGSIRLRADLSGDLHLKLDIAGSEGSINVGNIYEYIKTHQLSHPLPSGISLNHNNKSIHFEGIAELIYGTGTKFNVTITDKPSSQGTQEHTPIDAKTGLGTYEIQLDGKKLCFDLNDLKDKTEPEVFEKLKELQNEIV

SEQ ID NO: 247 - protein, 318 aa, Enterococcus sp.
MIKGISKMKKVIKLMLGVVGATSVGLFKGESVACADDSLPQIGEGYLKSVNQSTIDRMSTMAYALSYQMYQWGDIGVNERLTGNEYNPKNVSSQSYSVGVNSDMGTKQTSKTVNTSVFHNQTNQDQTFTTPSYTETYIDSITTSTTHSAGISTSASTEIRVPMFGSASMGLELSYNFSTTTSHTRETQKGWTVPGQAINVRPGHTVEVNWVFYTGEATGTVDLQERIRADIPYKKDAAGRIHTYGLGMVVGDRQVLSDSYWYRYITETRNNWKKVDANVAGHKIGAGTYRVDYGSGFVLEAFDRTTGTKEIIATGYQF

SEQ ID NO: 248 - protein, 311 aa, Artificial Sequence
  synthetic
MKKVIKLMLGVVGATSVGLFKGESVACADDSLPQIGEGYLKSVNQSTIDRMSTMAYALSYQMYQWGDIGVNERLTGNEYNPKNVSSQSYSVGVNSDMGTKQTSKTVNTSVFHNQTNQDQTFTTPSYTETYIDSITTSTTHSAGISTSASTEIRVPMFGSASMGLELSYNFSTTTSHTRETQKGWTVPGQAINVRPGHTVEVNWVFYTGEATGTVDLQERIRADIPYKKDAAGRIHTYGLGMVVGDRQVLSDSYWYRYITETRNNWKKVDANVAGHKIGAGTYRVDYGSGFVLEAFDRTTGTKEIIATGYQF

SEQ ID NO: 249 - protein, 284 aa, Artificial Sequence
  synthetic
MDDSLPQIGEGYLKSVNQSTIDRMSTMAYALSYQMYQWGDIGVNERLTGNEYNPKNVSSQSYSVGVNSDMGTKQTSKTVNTSVFHNQTNQDQTFTTPSYTETYIDSITTSTTHSAGISTSASTEIRVPMFGSASMGLELSYNFSTTTSHTRETQKGWTVPGQAINVRPGHTVEVNWVFYTGEATGTVDLQERIRADIPYKKDAAGRIHTYGLGMVVGDRQVLSDSYWYRYITETRNNWKKVDANVAGHKIGAGTYRVDYGSGFVLEAFDRTTGTKEIIATGYQF

SEQ ID NO: 250 - protein, 311 aa, Yokenella sp.
MYCRHGMHSLFINFIGASIMGINVQVNTDADPKKTTVSASGSIQHVITGNEVNSFGLSDSALKDAVAKYFGKRPNDAYLKSPTPWGDLYKTYGWEQVQTVLVARSAQVLSVNSSPSIIKTVILKNNSNKPATFNASVSDNITNSVETNWNVTTSVDFSETVSYEVSFEGLGSVGGSTTWSFGMSFGVGGSKSESISIGSDQGVTVDLDPGESVEVQLTASIGSLRARVFYDVYLTGYSAVNYNPTFKDHHFWALNIGDVMSAGGISNNRQITEDITVGYYSNAQVILSNAKKTVLRALAVPLENSVPVDAG

SEQ ID NO: 251 - protein, 282 aa, Artificial Sequence
  synthetic
MDPKKTTVSASGSIQHVITGNEVNSFGLSDSALKDAVAKYFGKRPNDAYLKSPTPWGDLYKTYGWEQVQTVLVARSAQVLSVNSSPSIIKTVILKNNSNKPATFNASVSDNITNSVETNWNVTTSVDFSETVSYEVSFEGLGSVGGSTTWSFGMSFGVGGSKSESISIGSDQGVTVDLDPGESVEVQLTASIGSLRARVFYDVYLTGYSAVNYNPTFKDHHFWALNIGDVMSAGGISNNRQITEDITVGYYSNAQVILSNAKKTVLRALAVPLENSVPVDAG

SEQ ID NO: 252 - protein, 436 aa, Unknown
  Unknown organism from environmental sample
LKMSFANSVFPSFLLLNSLLYLKYSNELRRNILKTNKWLRTIPVACLLSSAILVLPTSSFAATNLDSCLKQGKGYEQSCVTSADPGVNNRTASMYNTINRLVKEDTLNEQTNWKKDTYNFIRLNYLILPSQDRDVLNQLNTIPKDNVELKQVLKVLNGYHNRTNTITDTKTLQISNVNVNTYIEDPKPDPHSDQYREINTKAINESYSQTLTKKTQNITESIQSSKQLTVTHSLNTGVKEGLKSSIGVSVPIIGEVKGELSFEYSLNYGYTNASATIDTITHTVTSPQEDISLAPRTGAVVTAKLSTPVYKTKLLGTSRIKGYYTDQVNSYSTWVQLGIYNKFKVISQHNPTIWNKLKELGFSLDDQTKEVIFNGVIDLTDRHAPGSTFESRTQIYELDANGNINYNKPVGKPQTTEGQVQKSNISNNTSRLLLVK

SEQ ID NO: 253 - protein, 376 aa, Artificial Sequence
  synthetic
MATNLDSCLKQGKGYEQSCVTSADPGVNNRTASMYNTINRLVKEDTLNEQTNWKKDTYNFIRLNYLILPSQDRDVLNQLNTIPKDNVELKQVLKVLNGYHNRTNTITDTKTLQISNVNVNTYIEDPKPDPHSDQYREINTKAINESYSQTLTKKTQNITESIQSSKQLTVTHSLNTGVKEGLKSSIGVSVPIIGEVKGELSFEYSLNYGYTNASATIDTITHTVTSPQEDISLAPRTGAVVTAKLSTPVYKTKLLGTSRIKGYYTDQVNSYSTWVQLGIYNKFKVISQHNPTIWNKLKELGFSLDDQTKEVIFNGVIDLTDRHAPGSTFESRTQIYELDANGNINYNKPVGKPQTTEGQVQKSNISNNTSRLLLVK

SEQ ID NO: 254 - protein, 404 aa, Artificial Sequence
  synthetic
MKTNKWLRTIPVACLLSSAILVLPTSSFAATNLDSCLKQGKGYEQSCVTSADPGVNNRTASMYNTINRLVKEDTLNEQTNWKKDTYNFIRLNYLILPSQDRDVLNQLNTIPKDNVELKQVLKVLNGYHNRTNTITDTKTLQISNVNVNTYIEDPKPDPHSDQYREINTKAINESYSQTLTKKTQNITESIQSSKQLTVTHSLNTGVKEGLKSSIGVSVPIIGEVKGELSFEYSLNYGYTNASATIDTITHTVTSPQEDISLAPRTGAVVTAKLSTPVYKTKLLGTSRIKGYYTDQVNSYSTWVQLGIYNKFKVISQHNPTIWNKLKELGFSLDDQTKEVIFNGVIDLTDRHAPGSTFESRTQIYELDANGNINYNKPVGKPQTTEGQVQKSNISNNTSRLLLVK

SEQ ID NO: 255 - protein, 332 aa, Unknown
  Unknown organism from environmental sample
MYKMNKWIKPILCVGILTTSVTTFNTSNIVYAQSSSQFIYDLQNNAMDCLNSIGRSQNNDVNFQENTSAETYNFKSVSFNSPLDIKFEKYYAEKIDPENQIDEKTVFSFTDELINRSSTSQKLSTGSRSETVSNTTTATITKGFKIGGKTSAKISIPFIGETGIEVSPEYNQSNATSDVKTTMKALTATPQLIDVPAGKKALVAVEFTQRTIEGKVKLNAIASEHAKGTFDYIGMPFITSGANKWVKKEFDMNLNQIYKKSAELSNEANDPSIITINPDNETITLHGEAKYTSENTASSFRVHVDIVDIDTNNNNRINKRDISNSYSYTVNL

SEQ ID NO: 256 - protein, 301 aa, Artificial Sequence
  synthetic
MQSSSQFIYDLQNNAMDCLNSIGRSQNNDVNFQENTSAETYNFKSVSFNSPLDIKFEKYYAEKIDPENQIDEKTVFSFTDELINRSSTSQKLSTGSRSETVSNTTTATITKGFKIGGKTSAKISIPFIGETGIEVSPEYNQSNATSDVKTTMKALTATPQLIDVPAGKKALVAVEFTQRTIEGKVKLNAIASEHAKGTFDYIGMPFITSGANKWVKKEFDMNLNQIYKKSAELSNEANDPSIITINPDNETITLHGEAKYTSENTASSFRVHVDIVDIDTNNNNRINKRDISNSYSYTVNL

SEQ ID NO: 257 - protein, 642 aa, Dyadobacter sp.
MAFKPRPDQQYYLIPKHSEKEKEVMALGIDNGDRGTRLRLKKFNPESAKQKFRFDRSPGFCWIKLPAYDLYMDVASESQADGADVVAWAWFPRGQNQMFELVPAGDGYYRIMARHSRKYMDVYGAEKTEKGVLVQHRLMGSDNQLFKPVLVANQPVGASPVSFKESNELLRTGVLGVIGLVPEVGAGLKFIVGYFWKEENKLAAIWEQMKSYVDNRIVEFIMADKLKSMGEELVGKINSIKQIHESKSTDKGIRLMGVLDRLIEMEPRYVNQSHEVLPYLVGFGTIVITLCHTIATEFETLYHRKPTEDEKDENLKKLLEKITYYSTKVEENRTRIMALRMEKIPEVSLFRAGSDNDSRGKMRWEDNDTIQREIADFENRECPLLNDSEGQTAGQFFSDETGEIIRTGDTAQPNARDWSRADDYYDGWQLYWDRYWSKEHPYVFTDHKERADFALKQRRKQVEVQYSAELDEFLSAARFWKYFDSSVPRYQEVKISKSVGKFGGMDANTTFEGVEDKPITSVKFFSNDGKICGIEVFYDRASEGLKGSRGNAETTLELGAGEYISSVYGFAWNKISGLYFSTNKGNVKGTGRLDTWYAGYKDDSHFFTADLPDTLNAKLVRVSGAHNGEVLQQLTFHWEYMY

SEQ ID NO: 258 - protein, 1057 aa, Bacillus sp.
LKNIYKCLTVTALLTQLATFPAESFAENESIPGDVSNKNAQSSVHGLMGQYFIDDAFSQLAFIQVGENSELINKNKIQEAIKNIQSVRWIGQLKPSETGEYSISTSNDQNVILQINGETLINQKNENKSIKLEKDKEYEIKIEYQNKDKKELQLFWEMNQSEKVKIPEKNIISPDFSRKVDLPDNEKEQKLIPESNLFNKKGRTQQATMVVDTDKDGIPDTLEENGYTFKDNQIVPWNESFASLGYKKYVSNPRSARTVADPYTDFEKVTGHMPAATKDEAKDPLVAAYPAVGVGMEKFHFSPNENVSEGASGTKTKSVTDTSTTSHSVDIGGKIGFNKDGFSFDFSPKYTHSWSNSTSVQNTESETWSTQIGINPAERAFLNANIRYYNAGTAPIYDVKPTSNFVLQHSGSSIATITSGPNQIGNSLAPGDTYPKRGQAPISLNSANEAGTVKIPINGEQLDKIQSGDDVLDLETTQNKGQFATVDATGNPVTDPSKQWDPIRTNIDAVSGALTLNFGTGKDSLERRIAAKNPNNPEDKTPEITIKEAIKKAFGAKEKDGRMYVMDRNGKDVWIDESAVNLIGDANTQKEIENQLSKMSDKKVYNVKWKRGMKITLHVPTAYHDFEANSAGWYYTYKDNGGYTGQKRGRIGETGNGYTVANLTLKPYTSYTARAYVKTGTSTGNNDVTFYVDNSTGAGKGAKTSGKVTGDKWKMVEFSFNTGGNPEYFFKIGFQNKGNAQLHFDDVSITEWAQSENLQKGHRLETWQTAPNNRIDGVTFSKFPSAKLRYQLEIEGKFTEIRSDAITDTNGKRYLNFHKFNNNQGIDSNKKIAVYAVDEKNDHLKMKLQENEPQHHFKSWNVVTHSNKKYVNGVTFQKVPTEEVNYQLKVNGSWTAIKSGYAVQPDGSKYINFLEFNGGYGYAESTSIEVWAVSKSDSTKKTRVAHYNNKETLVASISSNPSPSPGQKNRSSQNFSIDNLPAGTKGLKWVVEPTTPDSASNIRFKIMRDVSGGTDPVVWSDLFNQKTTGIQTSSKFYVSNPQGASKNFTVKVYAISN

SEQ ID NO: 259 - protein, 1032 aa, Artificial Sequence
  synthetic
MENESIPGDVSNKNAQSSVHGLMGQYFIDDAFSQLAFIQVGENSELINKNKIQEAIKNIQSVRWIGQLKPSETGEYSISTSNDQNVILQINGETLINQKNENKSIKLEKDKEYEIKIEYQNKDKKELQLFWEMNQSEKVKIPEKNIISPDFSRKVDLPDNEKEQKLIPESNLFNKKGRTQQATMVVDTDKDGIPDTLEENGYTFKDNQIVPWNESFASLGYKKYVSNPRSARTVADPYTDFEKVTGHMPAATKDEAKDPLVAAYPAVGVGMEKFHFSPNENVSEGASGTKTKSVTDTSTTSHSVDIGGKIGFNKDGFSFDFSPKYTHSWSNSTSVQNTESETWSTQIGINPAERAFLNANIRYYNAGTAPIYDVKPTSNFVLQHSGSSIATITSGPNQIGNSLAPGDTYPKRGQAPISLNSANEAGTVKIPINGEQLDKIQSGDDVLDLETTQNKGQFATVDATGNPVTDPSKQWDPIRTNIDAVSGALTLNFGTGKDSLERRIAAKNPNNPEDKTPEITIKEAIKKAFGAKEKDGRMYVMDRNGKDVWIDESAVNLIGDANTQKEIENQLSKMSDKKVYNVKWKRGMKITLHVPTAYHDFEANSAGWYYTYKDNGGYTGQKRGRIGETGNGYTVANLTLKPYTSYTARAYVKTGTSTGNNDVTFYVDNSTGAGKGAKTSGKVTGDKWKMVEFSFNTGGNPEYFFKIGFQNKGNAQLHFDDVSITEWAQSENLQKGHRLETWQTAPNNRIDGVTFSKFPSAKLRYQLEIEGKFTEIRSDAITDTNGKRYLNFHKFNNNQGIDSNKKIAVYAVDEKNDHLKMKLQENEPQHHFKSWNVVTHSNKKYVNGVTFQKVPTEEVNYQLKVNGSWTAIKSGYAVQPDGSKYINFLEFNGGYGYAESTSIEVWAVSKSDSTKKTRVAHYNNKETLVASISSNPSPSPGQKNRSSQNFSIDNLPAGTKGLKWVVEPTTPDSASNIRFKIMRDVSGGTDPVVWSDLFNQKTTGIQTSSKFYVSNPQGASKNFTVKVYAISN

SEQ ID NO: 260 - protein, 1057 aa, Artificial Sequence
  synthetic
MKNIYKCLTVTALLTQLATFPAESFAENESIPGDVSNKNAQSSVHGLMGQYFIDDAFSQLAFIQVGENSELINKNKIQEAIKNIQSVRWIGQLKPSETGEYSISTSNDQNVILQINGETLINQKNENKSIKLEKDKEYEIKIEYQNKDKKELQLFWEMNQSEKVKIPEKNIISPDFSRKVDLPDNEKEQKLIPESNLFNKKGRTQQATMVVDTDKDGIPDTLEENGYTFKDNQIVPWNESFASLGYKKYVSNPRSARTVADPYTDFEKVTGHMPAATKDEAKDPLVAAYPAVGVGMEKFHFSPNENVSEGASGTKTKSVTDTSTTSHSVDIGGKIGFNKDGFSFDFSPKYTHSWSNSTSVQNTESETWSTQIGINPAERAFLNANIRYYNAGTAPIYDVKPTSNFVLQHSGSSIATITSGPNQIGNSLAPGDTYPKRGQAPISLNSANEAGTVKIPINGEQLDKIQSGDDVLDLETTQNKGQFATVDATGNPVTDPSKQWDPIRTNIDAVSGALTLNFGTGKDSLERRIAAKNPNNPEDKTPEITIKEAIKKAFGAKEKDGRMYVMDRNGKDVWIDESAVNLIGDANTQKEIENQLSKMSDKKVYNVKWKRGMKITLHVPTAYHDFEANSAGWYYTYKDNGGYTGQKRGRIGETGNGYTVANLTLKPYTSYTARAYVKTGTSTGNNDVTFYVDNSTGAGKGAKTSGKVTGDKWKMVEFSFNTGGNPEYFFKIGFQNKGNAQLHFDDVSITEWAQSENLQKGHRLETWQTAPNNRIDGVTFSKFPSAKLRYQLEIEGKFTEIRSDAITDTNGKRYLNFHKFNNNQGIDSNKKIAVYAVDEKNDHLKMKLQENEPQHHFKSWNVVTHSNKKYVNGVTFQKVPTEEVNYQLKVNGSWTAIKSGYAVQPDGSKYINFLEFNGGYGYAESTSIEVWAVSKSDSTKKTRVAHYNNKETLVASISSNPSPSPGQKNRSSQNFSIDNLPAGTKGLKWVVEPTTPDSASNIRFKIMRDVSGGTDPVVWSDLFNQKTTGIQTSSKFYVSNPQGASKNFTVKVYAISN

SEQ ID NO: 261 - protein, 1294 aa, Unknown
  Unknown organism from environmental sample
LNREGHKEMKCGRFKMIGGEFMNQYYGNNEMEILDPGVGRAKYPYAQNTRTGLQSMNYKEWLTFCGGNDGLSPSPFVAPQDIVSVTLNITGALLGLIPVVGGPLKAGVSILNSIIKLLWPTPTPEEPDPNEIWIQLKDKVEQLINQAINKAVWDAAIGKLNGLKRSLDLYQSAFSAWTEDQTDPELQEDVRMNFTSARHEMVTTIEQFRYTGQEVNLLTVFAQAADLHLLLLREGIMYGEQWGFDERTVQAFYSNAYGEGLRDLLPEYTDYCTKWYNEGLKITHNLKADLSNTERYPWAANKPDWNLQVLAELEGWNLFNDWRRDVTIMALDLVALWPTYDLKYYDNLAYGVTTELTRPVYSQAAGTSWVSSILPKDQYEQGIVRPPHLATWLNFIQFHLNPGPYDAPNSYKHYRGIQMEYYFSGRDYTTYLSPLIGSTSTSGKKVAVESKSGKDIFQVDSKHNDAVYTMDFFRNSGDIQTIGYPRTPNYSTLSWPPETNSSNYDHRMTWISGPVSSSTIPAFGMEWVHTSCSPFNAIADDTVENPIITQIPAVKGTNLSGNATVIKNPGHTGGDLVQLPTNSASQAQLLVNMEAPYSKVGKTYHIRIRYASSTNANLQVDHCGFNGGSCSSSVTIPVNPTYSNTELTYNAFQYVDVFTITLQNADFSIAFSNKGGGPIILDKIEFIPIEESVEEYEANQTFKKARKAVNALFANDEKIALRLNITDYDVNQVANIVNCISDDMFPKEKMLLLDQVKQAKRLSQARNLLNYGDFESPDWSNENGWKVSNNVMVQTDRPISRGRYLNMPGARIIEFSDIIYPTYAYQKIDESKLKPYTRYLVRGFVESSKKLDLLVTRYGKDIRTEMNVPSYQVINNQVVRMPDGCDTKQVSNYTISPTMPMDPCQNAYTTNDSIVMNPSTNGMCEDKHHFLFHIDVGELDMRANPGIEVGFKISSPEGMAKLDNLEVIEAQPLTNEALARVKKREQKWKKEREHQCVKTEKAVTSATQAVDSLFTSHQKNKLKETVNMQSIENAEAKVNAIPYVQNPEFKDLPGINTLIFQQLQSNIMTALNLYGRRNVIRNGDFSRGLTNWLVTDGVDVEERDGKFSVLVISQWDANVSQDVCVQPEHGYVLRVTARKEGAGKGYVTISDCTPENTETITFTSDEMIMAERAPGTIQTSSVCDITDNYGRGSSPYNNTVEKSYLEGLDIMPCSCGSYGREACSCGSNYMRNSSSERNIKQSYTSTQRIPNRNSSVYVTKMIEMFPETNRIRIEIGETQGTFLVDSIELICMED

SEQ ID NO: 262 - protein, 668 aa, Artificial Sequence
  synthetic
MNQYYGNNEMEILDPGVGRAKYPYAQNTRTGLQSMNYKEWLTFCGGNDGLSPSPFVAPQDIVSVTLNITGALLGLIPVVGGPLKAGVSILNSIIKLLWPTPTPEEPDPNEIWIQLKDKVEQLINQAINKAVWDAAIGKLNGLKRSLDLYQSAFSAWTEDQTDPELQEDVRMNFTSARHEMVTTIEQFRYTGQEVNLLTVFAQAADLHLLLLREGIMYGEQWGFDERTVQAFYSNAYGEGLRDLLPEYTDYCTKWYNEGLKITHNLKADLSNTERYPWAANKPDWNLQVLAELEGWNLFNDWRRDVTIMALDLVALWPTYDLKYYDNLAYGVTTELTRPVYSQAAGTSWVSSILPKDQYEQGIVRPPHLATWLNFIQFHLNPGPYDAPNSYKHYRGIQMEYYFSGRDYTTYLSPLIGSTSTSGKKVAVESKSGKDIFQVDSKHNDAVYTMDFFRNSGDIQTIGYPRTPNYSTLSWPPETNSSNYDHRMTWISGPVSSSTIPAFGMEWVHTSCSPFNAIADDTVENPIITQIPAVKGTNLSGNATVIKNPGHTGGDLVQLPTNSASQAQLLVNMEAPYSKVGKTYHIRIRYASSTNANLQVDHCGFNGGSCSSSVTIPVNPTYSNTELTYNAFQYVDVFTITLQNADFSIAFSNKGGGPIILDKIEFIPI

SEQ ID NO: 263 - protein, 401 aa, Unknown
  Unknown organism from environmental sample
MKSISKKVMAGLLVGATSLSIWAPISEAAAPENNRYYNIALKSNTKKVWNVSQASNDNDRAILLWQGGSADHERFAFFQLDGGAYAIVNKNSGKVVTFGTGSWTSGGPIPDSETLQQQKWTGEAKQKWNLRDLGSNGQGSNNYEIVNQANGKVPSYRWIGSTVDNAEYLKLDNSNPSDADKVFTLFNGTMNLWGQNITFFNDTISVPKLPATGTRPEAPDYTGGADQQLPQTSNSVVVGASLIPCFMVNDNQASDYTKIHNSPYYTLVKEEYWDKTFSAVIPAGLKRDYIFKSGMTSVDQQKMTDTLSMKIGADFGLKFGDASASLKTEISRTLQTEITSTDTEVSEETVASSLTSPTGKTTGFTEYQLATKYTLKRADGSLVSDPWIVKNNKEVIVRDQV

SEQ ID NO: 264 - protein, 372 aa, Artificial Sequence
  synthetic
MPENNRYYNIALKSNTKKVWNVSQASNDNDRAILLWQGGSADHERFAFFQLDGGAYAIVNKNSGKVVTFGTGSWTSGGPIPDSETLQQQKWTGEAKQKWNLRDLGSNGQGSNNYEIVNQANGKVPSYRWIGSTVDNAEYLKLDNSNPSDADKVFTLFNGTMNLWGQNITFFNDTISVPKLPATGTRPEAPDYTGGADQQLPQTSNSVVVGASLIPCFMVNDNQASDYTKIHNSPYYTLVKEEYWDKTFSAVIPAGLKRDYIFKSGMTSVDQQKMTDTLSMKIGADFGLKFGDASASLKTEISRTLQTEITSTDTEVSEETVASSLTSPTGKTTGFTEYQLATKYTLKRADGSLVSDPWIVKNNKEVIVRDQV

SEQ ID NO: 265 - protein, 490 aa, Raoultella sp.
MKLESNKVDNLFSASYSPVRSMALPGDVLPGVSIIGCGYNPYIAYADGSAVLNPVLDWSKCTFHSVNMNNQSYQVPEILNPVWLSNHTYFHVSGKTFQSYLTELSNSINVSGSYGFFSASATNEFTDSSLRKSENEFCRYQESFNLWKIIAPNDIARLQDYLTDDFKNLVNAIDPNNPQTLSTVFDVYGSHVLMGGVMGGKARISAWANKLTLTRKFDMTTIVKAEYDELTAKISAEDKLKYAEALESFSESGSYSYEVLGGSPSLGALVFKLNNQNSDDRLKNWVDSISTMPVLTDFIDNNSLLPVWQLIVDQSKAQALQAYYQATWSQQQMLLTRLRSNYIDAVTFVLGDNSDTPAPDGYTKVPVDLNSGAGGKYIYLCYHETPYTPINTKQAIVALQVLYGKQQPAPGYQKIDVDLNSGAGGEFVYLSYKLGDAKSNDAINRITAVYGKDQYVPTPYGYIQISGDLNAGAGGDFVYFCTFQGGLDQQ

SEQ ID NO: 266 - protein, 763 aa, Bacillus sp.
MNSYQNKNEYEIINTTQNYDNVTNRYPYANDPNIKLKNSNYSDWMNLCIRDRIGNISPTSARDVIETSTDIISRILGMLGIPVVSEILEIWNILFNALWPAPDAQWVAYINHTQALIQRELQLFAREQALRQLEGLGNNLNLYREAFREWEQDRNNPSTRNRVTDRFRIMDAFLTQYIPVFRISNYQVQLLSVYAQAANIHLLLLRDATIFGSDWGLTSTNINDIYNRQMNLIAEYTNHCTTWYNNGLIEARNLSRSSWDTFNTYRRDMTIMVLDLIALFPTYDHRRYPTATKLELTREIYTPAIASQNWSNFNHLSPNIDFAFYEHNLIRPPSLFTWLDRTEMFSRNLSVAVSEAWGGHRNYFHHTRSLPASLRSNFIGSDQRRVSQYNFNFVDNDIFRVDSLVGSNTVGNYFGVIQGNFHLVNRNSSSTRAIPFTTRSTNPSRRSIVSEFPGEDSNPPNFRNYTHRLSWISGAFIGSDIANVLAYGWTHRSVDPNNTILPNRITQIPAVKATTISNATVVSGPGSTGGNLVRLHNQGRFQIQMEFPTRQTNYRIRIRYASTAVWLLHVQFSGANHGLTLAPTTLSLDNLRYENFAYIDVIGTFIPTLGNYVTIINPHHGEMVIDRIEFIPIGTFANQSLGETQGYNNNYDQSYNNYNQNMENTHQPSYDNYNQNLNGMYEDTYYPNNNDSYDQNNTDTYDSGYNNNQNMENTYDQSYENYNPDNNNYNQYPNDICPQECTNEYNQNSGCTCNQGYNNNYPK

SEQ ID NO: 267 - protein, 633 aa, Artificial Sequence
  synthetic
MNSYQNKNEYEIINTTQNYDNVTNRYPYANDPNIKLKNSNYSDWMNLCIRDRIGNISPTSARDVIETSTDIISRILGMLGIPVVSEILEIWNILFNALWPAPDAQWVAYINHTQALIQRELQLFAREQALRQLEGLGNNLNLYREAFREWEQDRNNPSTRNRVTDRFRIMDAFLTQYIPVFRISNYQVQLLSVYAQAANIHLLLLRDATIFGSDWGLTSTNINDIYNRQMNLIAEYTNHCTTWYNNGLIEARNLSRSSWDTFNTYRRDMTIMVLDLIALFPTYDHRRYPTATKLELTREIYTPAIASQNWSNFNHLSPNIDFAFYEHNLIRPPSLFTWLDRTEMFSRNLSVAVSEAWGGHRNYFHHTRSLPASLRSNFIGSDQRRVSQYNFNFVDNDIFRVDSLVGSNTVGNYFGVIQGNFHLVNRNSSSTRAIPFTTRSTNPSRRSIVSEFPGEDSNPPNFRNYTHRLSWISGAFIGSDIANVLAYGWTHRSVDPNNTILPNRITQIPAVKATTISNATVVSGPGSTGGNLVRLHNQGRFQIQMEFPTRQTNYRIRIRYASTAVWLLHVQFSGANHGLTLAPTTLSLDNLRYENFAYIDVIGTFIPTLGNYVTIINPHHGEMVIDRIEFIPI

SEQ ID NO: 268 - protein, 615 aa, Bacillus sp.
MKYKDRKDAKRKYQALLATVATMTLGISTLGSTTSAFAEEKDQNVAQQQNIGQQKSAGTFYAAPTQITNMATAFEKTLELLKNQKFTNAEGKQVSIFEGNKYITPEFLKGSISTTGVVLKQIYSDAYSKDFNNASRELAVSLTALIPYGGSIASPLLALIWPENVDNSQMKKIEKLIDAKIIKYDITTLKIEYNNLMTRQIAYEKSMTEPNIDKNTRKTNAINAQNAFTDMIAESNKSKELELAELPVYTTVAAAHIAFLKSMQVQQTRSAAGIDQGTINSNFNSGNLTDQIAIYTKHIQDVYDKREKEIFKQIEDIGKPFGGSISINNYQTVLTKKYNAIAANRSGNDGIEHLKDSLVKAKHQCDELSTELKALYDQTLGNAAFITMLGQWQKDTKTNKWSYIDTKGETKTDWLRLGDKWYYLSKGTNGDTKNLEGATFAKGEMVTGTMNLSGKTYYFNSDGEMIDYNSSSMNRTYKVVAKLDSSKVLDNDFNHDRLSLLWNDNGGDNQKWFLQYNTDKKAYKIINQQAPHDELAVNGQDNTVFATDDRNDSSDLRYWTLEPAGNGYVFIKNKASGRVLDVTDGNTADGTVIKTHSQNTPAVAAQMFKLETVQQ

SEQ ID NO: 269 - protein, 1261 aa, Bacillus sp.
LRNLIDVPVFLDQVIKKIRGGLYMNINDNKNEYEILDSGNLSYQPRYPLARAPGSECQKPNAKDGIYTPVGRVDTALQNIDIGLSIRTALSILQMLLSVSFPALGRAAGLINIIFGFLWGTLAGQSVWEKFMRAVESLVNQKITDAVRVKALSELEGVQNALELYQEAADDWNENPTDASNKERVRRQFTSTNTTIEYAMPSFRVPTFEVPLLTVYAQAANLHLQLLRDAVKFGNEWGMPSEEVEDMYNRLTRRTAEYTDHCVATYDKGLKEAYDLAPNPTDYNKYPYLNPYSKDPIYGKYYTAPVDWNLFNDYRRDMTLMVLDIVAVWPTYNPRIYTNPNGVQVELSREVYSTVYGRGGSNNSSFDAIESQIVRPPHLVTELTNLKIEQGATLDMEQIQYPKYMKVTNTLHYVGSSSTWEQSSSAIPIRPITQIHTIPANNIGNLSLSQLDVPYRFSFYNKDDALIAAVGAEFPPNTVTWNGIPKAEDSNQNSHHLSYVGALGTQSSAGFPWTYPTELLGEWGFGWLHNSLTPTNEILSDKITQIPAVKGYLLERGAKVVKGPGSTGGDLIQLPGASQGRITINISNAFQKSFMVRIRYAATADGQLKFGRISSDGGIHSTSTKYVTTGANENVNSLTYNRFKYTDVYGAMASNIYSGIVLINEMGGSIYIDKIEFIPIKGSLEVFEAEQDLENARKAVNALFTGAAKDVLKLNVTDYAVDQAANLVECVSDEMHPKEKMILLDQVKFAKRLSQTRNLLNYGDFESDDWSGANGWKTSNHVHVAADNPIFKGRYLHMPGATSSQLSSNVYPTYAYQKVDESKLKSYTRYLVRGFIGNSKDLELLVERYGKDVYVEMDVPNDIQYALPMNECGGFDRCGHVSYQAASHHTCTCKNTAQMDTDCQCKDKVNRTAPGVYTNTVPGSAMYTNGYHSHKSCGCKDPHVFSYHIDTGCVDQEENLGLWFALKIASENGVAKIDNLEIIEAQPLTGEALARVKKREHKWKQEMAQKRLHTEKAVQAARDAIQRLFTSPKLNRLKFETLLQQILNADALVQKISYVYHSFLIGAMPTVPGMNNEIYQKLSAAIAQARALYEQRNLVRNGTFSSGTGSWHVSDGVEVQPLQNTFVLVLSEWSDEASQDRRIDPERGYVLRVTARKEGAGKGTVTISDCADYTEKLTFTSCDYNTVGSQTMTSGTLSGFVTKTLEIFPDTDRIRIDIGETEGTFKIESVELICMEQMEDHMYDMAGNVEASIPPLVPPMN

SEQ ID NO: 270 - protein, 657 aa, Artificial Sequence
  synthetic
MNINDNKNEYEILDSGNLSYQPRYPLARAPGSECQKPNAKDGIYTPVGRVDTALQNIDIGLSIRTALSILQMLLSVSFPALGRAAGLINIIFGFLWGTLAGQSVWEKFMRAVESLVNQKITDAVRVKALSELEGVQNALELYQEAADDWNENPTDASNKERVRRQFTSTNTTIEYAMPSFRVPTFEVPLLTVYAQAANLHLQLLRDAVKFGNEWGMPSEEVEDMYNRLTRRTAEYTDHCVATYDKGLKEAYDLAPNPTDYNKYPYLNPYSKDPIYGKYYTAPVDWNLFNDYRRDMTLMVLDIVAVWPTYNPRIYTNPNGVQVELSREVYSTVYGRGGSNNSSFDAIESQIVRPPHLVTELTNLKIEQGATLDMEQIQYPKYMKVTNTLHYVGSSSTWEQSSSAIPIRPITQIHTIPANNIGNLSLSQLDVPYRFSFYNKDDALIAAVGAEFPPNTVTWNGIPKAEDSNQNSHHLSYVGALGTQSSAGFPWTYPTELLGEWGFGWLHNSLTPTNEILSDKITQIPAVKGYLLERGAKVVKGPGSTGGDLIQLPGASQGRITINISNAFQKSFMVRIRYAATADGQLKFGRISSDGGIHSTSTKYVTTGANENVNSLTYNRFKYTDVYGAMASNIYSGIVLINEMGGSIYIDKIEFIPI

SEQ ID NO: 271 - protein, 1238 aa, Artificial Sequence
  synthetic
MNINDNKNEYEILDSGNLSYQPRYPLARAPGSECQKPNAKDGIYTPVGRVDTALQNIDIGLSIRTALSILQMLLSVSFPALGRAAGLINIIFGFLWGTLAGQSVWEKFMRAVESLVNQKITDAVRVKALSELEGVQNALELYQEAADDWNENPTDASNKERVRRQFTSTNTTIEYAMPSFRVPTFEVPLLTVYAQAANLHLQLLRDAVKFGNEWGMPSEEVEDMYNRLTRRTAEYTDHCVATYDKGLKEAYDLAPNPTDYNKYPYLNPYSKDPIYGKYYTAPVDWNLFNDYRRDMTLMVLDIVAVWPTYNPRIYTNPNGVQVELSREVYSTVYGRGGSNNSSFDAIESQIVRPPHLVTELTNLKIEQGATLDMEQIQYPKYMKVTNTLHYVGSSSTWEQSSSAIPIRPITQIHTIPANNIGNLSLSQLDVPYRFSFYNKDDALIAAVGAEFPPNTVTWNGIPKAEDSNQNSHHLSYVGALGTQSSAGFPWTYPTELLGEWGFGWLHNSLTPTNEILSDKITQIPAVKGYLLERGAKVVKGPGSTGGDLIQLPGASQGRITINISNAFQKSFMVRIRYAATADGQLKFGRISSDGGIHSTSTKYVTTGANENVNSLTYNRFKYTDVYGAMASNIYSGIVLINEMGGSIYIDKIEFIPIKGSLEVFEAEQDLENARKAVNALFTGAAKDVLKLNVTDYAVDQAANLVECVSDEMHPKEKMILLDQVKFAKRLSQTRNLLNYGDFESDDWSGANGWKTSNHVHVAADNPIFKGRYLHMPGATSSQLSSNVYPTYAYQKVDESKLKSYTRYLVRGFIGNSKDLELLVERYGKDVYVEMDVPNDIQYALPMNECGGFDRCGHVSYQAASHHTCTCKNTAQMDTDCQCKDKVNRTAPGVYTNTVPGSAMYTNGYHSHKSCGCKDPHVFSYHIDTGCVDQEENLGLWFALKIASENGVAKIDNLEIIEAQPLTGEALARVKKREHKWKQEMAQKRLHTEKAVQAARDAIQRLFTSPKLNRLKFETLLQQILNADALVQKISYVYHSFLIGAMPTVPGMNNEIYQKLSAAIAQARALYEQRNLVRNGTFSSGTGSWHVSDGVEVQPLQNTFVLVLSEWSDEASQDRRIDPERGYVLRVTARKEGAGKGTVTISDCADYTEKLTFTSCDYNTVGSQTMTSGTLSGFVTKTLEIFPDTDRIRIDIGETEGTFKIESVELICMEQMEDHMYDMAGNVEASIPPLVPPMN

SEQ ID NO: 272 - protein, 240 aa, Unknown
  Unknown organism from environmental sample
MNYPILNNTNINSSLQQPRIHRPSRTIILTVPSRDESNIRNIFQVEPRYIARALNAAQAFQGAIGSDLNFNYDKAIQIANNIPYKDHRNISWHMNRTVIQETLQVSPMISKIKDILGDFLYFINISNAGFWNEVEAAIINTFTNLYTQANSAWIFWSNSTSTSTSYYYNILFAIRDSSNRKMIVIPIAFDITVRLEKQKVLWITIKDWAEYRVTIKCICVHLFLQGTPNQSIVDVFNPKS

SEQ ID NO: 273 - protein, 275 aa, Bacillus sp.
MFDLNKFLKAYETYLPIVDPRVTSASLASNNIRVISESATWNIDIPESSLIYTPIFGTTSTFTNDSKVAQNHVFSYNEQYTDTVSATQTSGVTYDIGSESSISGTIGVVGVSQKVTFKTTISNTSSTTNTFTKQRTWSDSVTINVPPESKMTTQAVILQGAFEVPLQTKVRLSGNATYNVSLPNGGTGTATYPIEYLWDKAYGFPTEFLSYSGWNQFQATLLSEDRIPRYAGTIALTGALGVRLEVRTKQTSLTGESPTARTISVPNPSPTILFQ

SEQ ID NO: 274 - protein, 425 aa, Pseudomonas sp.
LKSTCTLDPIRYKDLLINFTYNFSYYANNHTGNSEGEHFGDKPITFYRPRVPPELAEYSILGDVLEPNFQAIQGLKVVPVVADAQGPTGTALKPPIDFTWVWELKRPELTISIWHPVAPPGYVSMGLVCSNSFRPPNIAAVKCVREDLVIPARVDGEVWNDRGTHAGTNFSAWKIAPPSPLPAEVFFCTGTSIGHDQYSMPSSVNRAFALRTHLPIQAPPAPTHAPVLSGYARPSDFERNHATYTTVLPWFVISDPLLTPDQQFIQSPHYHLQRTEHYVLVRHAHNNTGDVQRYNWAIHSSESTSSTQTNSTTTGVELSVETGFTALFKMAAKSNFSISQSNAITQGWTTSKTFTVWCTLGPYKAVGVFLISYAYRLLRTDGSEVGEGLTLQPNNSLYWAEYPPAPRSVTIVETPEQEASSLLHE

SEQ ID NO: 275 - protein, 419 aa, Artificial Sequence
  synthetic
MDPIRYKDLLINFTYNFSYYANNHTGNSEGEHFGDKPITFYRPRVPPELAEYSILGDVLEPNFQAIQGLKVVPVVADAQGPTGTALKPPIDFTWVWELKRPELTISIWHPVAPPGYVSMGLVCSNSFRPPNIAAVKCVREDLVIPARVDGEVWNDRGTHAGTNFSAWKIAPPSPLPAEVFFCTGTSIGHDQYSMPSSVNRAFALRTHLPIQAPPAPTHAPVLSGYARPSDFERNHATYTTVLPWFVISDPLLTPDQQFIQSPHYHLQRTEHYVLVRHAHNNTGDVQRYNWAIHSSESTSSTQTNSTTTGVELSVETGFTALFKMAAKSNFSISQSNAITQGWTTSKTFTVWCTLGPYKAVGVFLISYAYRLLRTDGSEVGEGLTLQPNNSLYWAEYPPAPRSVTIVETPEQEASSLLHE

SEQ ID NO: 276 - protein, 753 aa, Bacillus sp.
MNQNYNNEYEIRDNEGRCCQSRYPLANAPGSELQQMNYQDWMNTYAGGELRGLCEGTVGDSVKTGLIIATGLAWALLTIIPGVNVAVAAGAAAAAGTLNVLLPYFWPESKCPNPPDPGTSQSQFTWKQMMSAVEEMTKKTIQENRRVDALARWEGIQTLARDYYKALCILSKDPTNDQKKAAVRDAFDDVEDYLKISMPFFRAQGFEIQMLAMYTQAANFHLILLRNVVQYGTSWGFAQYEVDQYYSNADNIGNPGLVQLLAIYTDYCVRWYKTGLQEQYNTGDWNKFNDFRRNMTIMVLDTVAVWPTYDPQTYTVPTKSQLSRTVYTNIVGNTGGTGLTEEGHQSIGTIENNLVEIPQLFRWLNTITAEGVPTTGDAGKAVVKGLGLKFNYTGGSSEIDGVYKGENGTISQSVDVSTNFEVSVVTHTKVLGDAITGFVLYVPQTAKYYGLLGNGTLYDTSGGLPCRGEGNSDCDPCTPNNPCISDTIYGTELCYKPGYSYSHRFLTMGLGMLTAKNPEFVTPGTKFASYFSYGWTHISADAENTIESNMITQIPAVKASSISGDARVVRGPGSTGGDLVELPFATGGSISWNVTLADIRKSYKVRTRYAYGSNSTSADTLSYTDFSYSDFHTFTSESTDYTYIYELDPSYFEGVEGKFFIDKIEFIPIEGSLEEYQADQSLEKARKAVNALFTNDAKNALQLDATDYAVDQAENLAECVSDEFHAQEKMILLDQVKFAKRLSQARNLLNYGD

SEQ ID NO: 277 - protein, 669 aa, Artificial Sequence
  synthetic
MNQNYNNEYEIRDNEGRCCQSRYPLANAPGSELQQMNYQDWMNTYAGGELRGLCEGTVGDSVKTGLIIATGLAWALLTIIPGVNVAVAAGAAAAAGTLNVLLPYFWPESKCPNPPDPGTSQSQFTWKQMMSAVEEMTKKTIQENRRVDALARWEGIQTLARDYYKALCILSKDPTNDQKKAAVRDAFDDVEDYLKISMPFFRAQGFEIQMLAMYTQAANFHLILLRNVVQYGTSWGFAQYEVDQYYSNADNIGNPGLVQLLAIYTDYCVRWYKTGLQEQYNTGDWNKFNDFRRNMTIMVLDTVAVWPTYDPQTYTVPTKSQLSRTVYTNIVGNTGGTGLTEEGHQSIGTIENNLVEIPQLFRWLNTITAEGVPTTGDAGKAVVKGLGLKFNYTGGSSEIDGVYKGENGTISQSVDVSTNFEVSVVTHTKVLGDAITGFVLYVPQTAKYYGLLGNGTLYDTSGGLPCRGEGNSDCDPCTPNNPCISDTIYGTELCYKPGYSYSHRFLTMGLGMLTAKNPEFVTPGTKFASYFSYGWTHISADAENTIESNMITQIPAVKASSISGDARVVRGPGSTGGDLVELPFATGGSISWNVTLADIRKSYKVRTRYAYGSNSTSADTLSYTDFSYSDFHTFTSESTDYTYIYELDPSYFEGVEGKFFIDKIEFIPI

SEQ ID NO: 278 - protein, 298 aa, Unknown
  Unknown organism from environmental sample
LRFMAIFDFDAYLLALANKVFPLPWISRVDTSNLAVKNAESYGFEIKNSKPQGTMFIGESVLKNDTNETQTIHSDSFTKTITDSVTLSVTTGITTGIDISIGGKIFGMGVETSMSFEVSTSTTNEQTSEESVAYTVPSQPVVVPAKKTYYVHTSLQRSQLEGSIRLRADLSGPFSVYMKMNGTEMPLGSHSLYDFIKEHQSLHPLPSGISLNHNNKSVHFEGIAEYIFGTGTKFYVTITDTPSSQGTQEHKAYDAKTGLGTYEIDLDGKKLGFALNDLKDKLEPEAFEKLKELQNEIV

SEQ ID NO: 279 - protein, 295 aa, Artificial Sequence
  synthetic
MAIFDFDAYLLALANKVFPLPWISRVDTSNLAVKNAESYGFEIKNSKPQGTMFIGESVLKNDTNETQTIHSDSFTKTITDSVTLSVTTGITTGIDISIGGKIFGMGVETSMSFEVSTSTTNEQTSEESVAYTVPSQPVVVPAKKTYYVHTSLQRSQLEGSIRLRADLSGPFSVYMKMNGTEMPLGSHSLYDFIKEHQSLHPLPSGISLNHNNKSVHFEGIAEYIFGTGTKFYVTITDTPSSQGTQEHKAYDAKTGLGTYEIDLDGKKLGFALNDLKDKLEPEAFEKLKELQNEIV

SEQ ID NO: 280 - protein, 253 aa, Bacillus sp.
MPIQEKFSFSELSAVGSNPNSVREKFKERFGVLPDGIAVNSETYYNAEKPAITEQYGHPCYKTLGEFTYQIGNGQPPSEAILGSNYAVNHGDEEASISLSVQGNWTETKTWSSQTTTGLTISSKFTLEDLLEWDAELSVLTTVGESSSNSISRSVSSTVTVAVPPRSKKKISMVRIMKQETMDFQAPLSVQGSFGANFSRKVEDHYFWFLGTGNVLNCTFRTKALIGKIKNTAIFNVQTEVGAAELLNAKTPV

SEQ ID NO: 281 - protein, 252 aa, Unknown
  Unknown organism from environmental sample
MNTTVDKAKKIVTRNIYVSLSAGEGQVNFNEIFSITDPKIAPQAFAMARVFQDALVSTADGKSLRFDVQKALTLIKGNKDMAVINFTDQVVEQSNAAVTLMVDKVLEILNKVLGVVLGEVPKAKLVESVTSAFTNLNEQKDSAWIFWEKSEAHKTTYQYNILFGVQSKDTGLFLYGLPMGMEINVDIEKERVLFITLKDKESYRVHLQSLSVVEMIKTPANLQLAAKGGKDPLQEAQEFFTQHKNKEPVRIK

SEQ ID NO: 282 - protein, 1168 aa, Bacillus sp.
MEVGLMGNCNEIDVAGNQLRYPFVKAPYPEIQQCDCKKLVNISSDGELKNLYDTESSFKKGAIIVSGIGWALLGFVPTVGPFLSAAAGVANVMIPYMWPDLNDTPNPVPTEEHWTWKQIIDEINNEVNEAVIKMTNTKLSSIKNALEVYREAVSDWERDRDNEANRDRVLEQFRITQTILYTEMSAFQIQGYEDSLLGVFVMAATLYLGLLRDGIKFGASWGMSTESGDELDDTYNKFERLVNKYTEYCIYWYNKILHDKYQENMGKWNDYNNFRRTMTILVLDIVAIWPTLNPRRYELPIKGQLTRTIYTPMIGKPQKEEPHVLFDATIKSIEESVLPPLNLFSWLQEIDFFTKNPPTNYLYAGYIMKLKTTFGDSYKKQFGQGGNSTKIQIGESDSEVYKMTNVVLESDDTQLLTFDFNFSSSDCIRVPSSHFSENLPPTKTLINGLSCLKNVPCLSDEPCDLFSEGEICDEPAHYGHRLSWIGSWFDQYDYLYHTIYGWTHRSVDKNNLLDNKKITQIPAVKASETTGHVIKGPGSTGGDLVKLPVDSHMEINVTIPASDLPQTYFMRIRYASPDDNIIFFSESINGDYKQLDILATNYSGDLKYNNFDYATVSDIVAPASENEKVCTINLRNMSNNEFNYIIIDKIEFIPIQESLTFNQEDEILEKLSKMVDDLFATDKKNTLKLRVTDYHIDQVARQVECMSDKIYWQEKIVLLNQVKLAKRLSKSRNLLKYGDCNLISNSEWKKSNRVFVTSDNPIFKGECLEMLGASQLQFSNNFYPTYLYQKIEESNLKPYTQYIVRGFVERSKNLEILISRYDNEVHKKMNIPNYTSSINPYFNIYNEEQSAVNLRAYGDMIEMDDINNRERYQNSNEFEFYIDTGNLDMNQNLGIWIGFKIETLDGMAILNNLELIEADSLKGEALEHVKECEQKWKRKWIEEQIAIERAVHIAQDMIQRLFTSPYKDRLKRDTTLKNILEAEQSVKMIPHIYNQFLVDALPVVPGEAFNIFQKLSNEVKIARVLYEQRNMIVNGNFIKGLSNWCSTNGIEVEQIEGLSVLVIKDWSATISQQVSVKSEQRYMLRITARKEGNGEGYVTISDGTEENTETLKFIMQEEEINTMVSENCSGLFRYVTKIVEIFPKTDCIYIEIGETDGEFMVESIELID

SEQ ID NO: 283 - protein, 650 aa, Artificial Sequence
  synthetic
MGNCNEIDVAGNQLRYPFVKAPYPEIQQCDCKKLVNISSDGELKNLYDTESSFKKGAIIVSGIGWALLGFVPTVGPFLSAAAGVANVMIPYMWPDLNDTPNPVPTEEHWTWKQIIDEINNEVNEAVIKMTNTKLSSIKNALEVYREAVSDWERDRDNEANRDRVLEQFRITQTILYTEMSAFQIQGYEDSLLGVFVMAATLYLGLLRDGIKFGASWGMSTESGDELDDTYNKFERLVNKYTEYCIYWYNKILHDKYQENMGKWNDYNNFRRTMTILVLDIVAIWPTLNPRRYELPIKGQLTRTIYTPMIGKPQKEEPHVLFDATIKSIEESVLPPLNLFSWLQEIDFFTKNPPTNYLYAGYIMKLKTTFGDSYKKQFGQGGNSTKIQIGESDSEVYKMTNVVLESDDTQLLTFDFNFSSSDCIRVPSSHFSENLPPTKTLINGLSCLKNVPCLSDEPCDLFSEGEICDEPAHYGHRLSWIGSWFDQYDYLYHTIYGWTHRSVDKNNLLDNKKITQIPAVKASETTGHVIKGPGSTGGDLVKLPVDSHMEINVTIPASDLPQTYFMRIRYASPDDNIIFFSESINGDYKQLDILATNYSGDLKYNNFDYATVSDIVAPASENEKVCTINLRNMSNNEFNYIIIDKIEFIPI

SEQ ID NO: 284 - protein, 1163 aa, Artificial Sequence
  synthetic
MGNCNEIDVAGNQLRYPFVKAPYPEIQQCDCKKLVNISSDGELKNLYDTESSFKKGAIIVSGIGWALLGFVPTVGPFLSAAAGVANVMIPYMWPDLNDTPNPVPTEEHWTWKQIIDEINNEVNEAVIKMTNTKLSSIKNALEVYREAVSDWERDRDNEANRDRVLEQFRITQTILYTEMSAFQIQGYEDSLLGVFVMAATLYLGLLRDGIKFGASWGMSTESGDELDDTYNKFERLVNKYTEYCIYWYNKILHDKYQENMGKWNDYNNFRRTMTILVLDIVAIWPTLNPRRYELPIKGQLTRTIYTPMIGKPQKEEPHVLFDATIKSIEESVLPPLNLFSWLQEIDFFTKNPPTNYLYAGYIMKLKTTFGDSYKKQFGQGGNSTKIQIGESDSEVYKMTNVVLESDDTQLLTFDFNFSSSDCIRVPSSHFSENLPPTKTLINGLSCLKNVPCLSDEPCDLFSEGEICDEPAHYGHRLSWIGSWFDQYDYLYHTIYGWTHRSVDKNNLLDNKKITQIPAVKASETTGHVIKGPGSTGGDLVKLPVDSHMEINVTIPASDLPQTYFMRIRYASPDDNIIFFSESINGDYKQLDILATNYSGDLKYNNFDYATVSDIVAPASENEKVCTINLRNMSNNEFNYIIIDKIEFIPIQESLTFNQEDEILEKLSKMVDDLFATDKKNTLKLRVTDYHIDQVARQVECMSDKIYWQEKIVLLNQVKLAKRLSKSRNLLKYGDCNLISNSEWKKSNRVFVTSDNPIFKGECLEMLGASQLQFSNNFYPTYLYQKIEESNLKPYTQYIVRGFVERSKNLEILISRYDNEVHKKMNIPNYTSSINPYFNIYNEEQSAVNLRAYGDMIEMDDINNRERYQNSNEFEFYIDTGNLDMNQNLGIWIGFKIETLDGMAILNNLELIEADSLKGEALEHVKECEQKWKRKWIEEQIAIERAVHIAQDMIQRLFTSPYKDRLKRDTTLKNILEAEQSVKMIPHIYNQFLVDALPVVPGEAFNIFQKLSNEVKIARVLYEQRNMIVNGNFIKGLSNWCSTNGIEVEQIEGLSVLVIKDWSATISQQVSVKSEQRYMLRITARKEGNGEGYVTISDGTEENTETLKFIMQEEEINTMVSENCSGLFRYVTKIVEIFPKTDCIYIEIGETDGEFMVESIELID

SEQ ID NO: 285 - protein, 250 aa, Unknown
  Unknown organism from environmental sample
VQKSHKKERVYMNYPILNNTNINSSLQQPRIHRPSRTIILTVPSRDESNIRNIFQVEPRYIARALNAAQAFQGAIGSDLNFNYDKAIQIANNIPYKDHRNISWHMNRTVIQETLQVSPMISKIKDILGDFLYFINISNAGFWNEVEAAIINTFTNLYTQTNSAWIFWSSSTSTSTSYYYNILFAIPSTNQSMVVIPIAFDITVRLEKQKVLFITIKDRAEFRVTIKAIYVHVLLHSLSNQSIVDVFNPKS

SEQ ID NO: 286 - protein, 239 aa, Artificial Sequence
  synthetic
MNYPILNNTNINSSLQQPRIHRPSRTIILTVPSRDESNIRNIFQVEPRYIARALNAAQAFQGAIGSDLNFNYDKAIQIANNIPYKDHRNISWHMNRTVIQETLQVSPMISKIKDILGDFLYFINISNAGFWNEVEAAIINTFTNLYTQTNSAWIFWSSSTSTSTSYYYNILFAIPSTNQSMVVIPIAFDITVRLEKQKVLFITIKDRAEFRVTIKAIYVHVLLHSLSNQSIVDVFNPKS

SEQ ID NO: 287 - protein, 376 aa, Bacillus sp.
MKRQKIHEINRILKGEKKMKRYKKLLMVAPLACMLGTGVVTLPTASHADAAPVASVVDDQFRQGSTYSTENISQALYVRLIRGIEGSPELRQKFKLADDESVQREQGETIFNGTKYPATDYGLRDQLSKVTASSIGKNISVNPTTVTEVEAGKIELLTYRNETPLTQKQYTTEKSVKRIDTVTATNQYGFKLGFESNTEFKVDALIASAKQSFKASAEFSFSHTDTNTVTNEEMVTFKAQEVLAAAGGTTNYFTRVGKAKFSGSFQTDAALTNLKLKLPIVKKNDNRTVVHTEEVTLTSQDIYTIFKNAPYIPLPSYLSFDDNGKKVLVKNVTFDYSGEMGYSTAAQAEFIPFNQEKPAQTMSYEKYEAKTQDKSL

SEQ ID NO: 288 - protein, 358 aa, Artificial Sequence
  synthetic
MKRYKKLLMVAPLACMLGTGVVTLPTASHADAAPVASVVDDQFRQGSTYSTENISQALYVRLIRGIEGSPELRQKFKLADDESVQREQGETIFNGTKYPATDYGLRDQLSKVTASSIGKNISVNPTTVTEVEAGKIELLTYRNETPLTQKQYTTEKSVKRIDTVTATNQYGFKLGFESNTEFKVDALIASAKQSFKASAEFSFSHTDTNTVTNEEMVTFKAQEVLAAAGGTTNYFTRVGKAKFSGSFQTDAALTNLKLKLPIVKKNDNRTVVHTEEVTLTSQDIYTIFKNAPYIPLPSYLSFDDNGKKVLVKNVTFDYSGEMGYSTAAQAEFIPFNQEKPAQTMSYEKYEAKTQDKSL

SEQ ID NO: 289 - protein, 327 aa, Artificial Sequence
  synthetic
MAPVASVVDDQFRQGSTYSTENISQALYVRLIRGIEGSPELRQKFKLADDESVQREQGETIFNGTKYPATDYGLRDQLSKVTASSIGKNISVNPTTVTEVEAGKIELLTYRNETPLTQKQYTTEKSVKRIDTVTATNQYGFKLGFESNTEFKVDALIASAKQSFKASAEFSFSHTDTNTVTNEEMVTFKAQEVLAAAGGTTNYFTRVGKAKFSGSFQTDAALTNLKLKLPIVKKNDNRTVVHTEEVTLTSQDIYTIFKNAPYIPLPSYLSFDDNGKKVLVKNVTFDYSGEMGYSTAAQAEFIPFNQEKPAQTMSYEKYEAKTQDKSL

SEQ ID NO: 290 - protein, 360 aa, Bacillus sp.
MVKKKQRNKALLVTAAACAIGFSGLGSATSAFAAVDPNAPQHTDYAENNGELSADDKAELNSLKSWNVYGSTVSVIRDIHPTGKVTVEDAGSEPLHNSTSTEQKLNTSSTKIVVKDTVSTTDAVEDALEVGLAAEFQAKQSVGVVESTQKFTASIKNTFKMTHSKTTAHEDTREFTIPSQSINVPAGKTYKVEYVYKKTDLEGTIDEIKEIKNSIDNGRNGKFNFTDVAIADYREYTWDEMSQLGGAMNKISDPIYNASPYQFYNQIANMYKQAQEKKYVNPILELTDMSANIHKISVPGLLSNIYLDHSLQKVYMVDKNVPFKATASGHEFIVNVYDVTDGTNSLVKSEAVQNATEVAK

SEQ ID NO: 291 - protein, 328 aa, Artificial Sequence
  synthetic
MAVDPNAPQHTDYAENNGELSADDKAELNSLKSWNVYGSTVSVIRDIHPTGKVTVEDAGSEPLHNSTSTEQKLNTSSTKIVVKDTVSTTDAVEDALEVGLAAEFQAKQSVGVVESTQKFTASIKNTFKMTHSKTTAHEDTREFTIPSQSINVPAGKTYKVEYVYKKTDLEGTIDEIKEIKNSIDNGRNGKFNFTDVAIADYREYTWDEMSQLGGAMNKISDPIYNASPYQFYNQIANMYKQAQEKKYVNPILELTDMSANIHKISVPGLLSNIYLDHSLQKVYMVDKNVPFKATASGHEFIVNVYDVTDGTNSLVKSEAVQNATEVAK

SEQ ID NO: 292 - protein, 846 aa, Unknown
  Unknown organism from environmental sample
MNPNVNNNAYELVGDSDTSYQPRYPLAQPPGSELRNMHYKDWLATFPERNDFISGENLSIKDGIVTSTNIIAYLLSIPFPAAGVAAGILGALMGWLWPTNTQAIWEAFMNAVEALIDQKIDKFARDQAIARLEGIHNVIELYQTAVSDLQKDPQNESLKENVREQFIATNTFIVGSMPLFRQGGYEVTMLAMFAEAANLHLLLLRDAAKFGATWGMNSTTVAGYQSNLETGIQVYTDYCVSTYNAGLEKAKKLVADLCDFNTYPWTRYNQGFREEEKPNCSLQQINRCEQQLEWDEYQEQKDPYAAAFRWSPGEYQNLENWNLYNAFRRDMTIMVLDLVSIWPTYNPKQYALPVKAELTREIYTDIRGTTYRSDESQNTLPAIEGRMIPPPTLFQWLRSFTFHGRTIQGNGSVDDWTSGNLVTGLQQTVQTTLGPSRVLPLTGTQGTSTTTLKPLEYADGITWIDTQQWFEPRLFQYWSGGYSTDWILRSSFGSITEKSPFWAEGPRWRVYGPTARANEIPEHRLSWMTYEPVRPNAPFVYPQYKQLGALALGWTHQSVDPENRVVSDRITQIPAVKGYWNRGAFSVVKGPGSTGGDLVQLSPSGEVSIMVKPSRPGIGSHRVRIRYAATANGRLNVKKYVSSVHASQSYDYKQTTTGNLTLSAFQYLDVYNFNLAETQFEIWLTNESGGPIYIDKIEFIPLTPIPEPPILPVDGIYQIVTAINNSSVAANVGRLTQGGPDQVKLASPSNSNYQKWEFLYDSNENVYTIKNLAGGFLTYVMLYPGYPVLALGSAQKWILEPAGNGDYYLLSKNDLTKAAFARDTESILILSDFTGSTNQKFKLKKL

SEQ ID NO: 293 - protein, 703 aa, Artificial Sequence
  synthetic
MNPNVNNNAYELVGDSDTSYQPRYPLAQPPGSELRNMHYKDWLATFPERNDFISGENLSIKDGIVTSTNIIAYLLSIPFPAAGVAAGILGALMGWLWPTNTQAIWEAFMNAVEALIDQKIDKFARDQAIARLEGIHNVIELYQTAVSDLQKDPQNESLKENVREQFIATNTFIVGSMPLFRQGGYEVTMLAMFAEAANLHLLLLRDAAKFGATWGMNSTTVAGYQSNLETGIQVYTDYCVSTYNAGLEKAKKLVADLCDFNTYPWTRYNQGFREEEKPNCSLQQINRCEQQLEWDEYQEQKDPYAAAFRWSPGEYQNLENWNLYNAFRRDMTIMVLDLVSIWPTYNPKQYALPVKAELTREIYTDIRGTTYRSDESQNTLPAIEGRMIPPPTLFQWLRSFTFHGRTIQGNGSVDDWTSGNLVTGLQQTVQTTLGPSRVLPLTGTQGTSTTTLKPLEYADGITWIDTQQWFEPRLFQYWSGGYSTDWILRSSFGSITEKSPFWAEGPRWRVYGPTARANEIPEHRLSWMTYEPVRPNAPFVYPQYKQLGALALGWTHQSVDPENRVVSDRITQIPAVKGYWNRGAFSVVKGPGSTGGDLVQLSPSGEVSIMVKPSRPGIGSHRVRIRYAATANGRLNVKKYVSSVHASQSYDYKQTTTGNLTLSAFQYLDVYNFNLAETQFEIWLTNESGGPIYIDKIEFIPLT

SEQ ID NO: 294 - protein, 623 aa, Bacillus sp.
MGKTSGEVKMLRTRQYRNGSEMVYDHGGGVKIAGKIGLGVVKTVITSIIRRGRDNEIAGRILSDVYNILWSNHKGYWNEMIEAVETLIQHDISENIRNNALAVLTDVRNALLQYQQAVDDWQRNRTDSKLQEQVRNQLIATNTFIEFAMSSFTVPHYEVILLPIFAQVANLHLLLLRDIEIFGLEWGMSKVEIDDYYFANSGLTGLTQKYTNHIVKWYREGLCIATNIDLGQCPEFYQLDKWNAMNDFRREMTFMVLDIIALWPTYDPIRYPLGIKTELTREVFTPLLGINPNSSSLIHTMEEIEDKLTFLSPFLSWISFEQLVKQGDGISTFTDWGNFTLSNTMLPISYILGGAGSGTGDSTNIPIKSENYDVYKVRVGTDYSHPSNVPIRKLEYYCTNGTMENVITVGTSTTNALFELPNNGYIDYSHRVSRLSCSNVEVYEWEGGPKYALKNIAYGWTHISVDSKNTLSANAITQIPARKGYSSSESNLSIAGPYFTGGDLISLPPNGAQLQMRVTPPVSSSTTNYCVRLRYASSGNTNIYVERVLSSGDTYGETHDIPATYSGGSLSYSSFAYVVNLTAIFEGFNVEIKIKNIGSSQIILDKIEFLPIKESLEGNKKLT

SEQ ID NO: 295 - protein, 614 aa, Artificial Sequence
  synthetic
MLRTRQYRNGSEMVYDHGGGVKIAGKIGLGVVKTVITSIIRRGRDNEIAGRILSDVYNILWSNHKGYWNEMIEAVETLIQHDISENIRNNALAVLTDVRNALLQYQQAVDDWQRNRTDSKLQEQVRNQLIATNTFIEFAMSSFTVPHYEVILLPIFAQVANLHLLLLRDIEIFGLEWGMSKVEIDDYYFANSGLTGLTQKYTNHIVKWYREGLCIATNIDLGQCPEFYQLDKWNAMNDFRREMTFMVLDIIALWPTYDPIRYPLGIKTELTREVFTPLLGINPNSSSLIHTMEEIEDKLTFLSPFLSWISFEQLVKQGDGISTFTDWGNFTLSNTMLPISYILGGAGSGTGDSTNIPIKSENYDVYKVRVGTDYSHPSNVPIRKLEYYCTNGTMENVITVGTSTTNALFELPNNGYIDYSHRVSRLSCSNVEVYEWEGGPKYALKNIAYGWTHISVDSKNTLSANAITQIPARKGYSSSESNLSIAGPYFTGGDLISLPPNGAQLQMRVTPPVSSSTTNYCVRLRYASSGNTNIYVERVLSSGDTYGETHDIPATYSGGSLSYSSFAYVVNLTAIFEGFNVEIKIKNIGSSQIILDKIEFLPIKESLEGNKKLT

SEQ ID NO: 296 - protein, 603 aa, Artificial Sequence
  synthetic
MLRTRQYRNGSEMVYDHGGGVKIAGKIGLGVVKTVITSIIRRGRDNEIAGRILSDVYNILWSNHKGYWNEMIEAVETLIQHDISENIRNNALAVLTDVRNALLQYQQAVDDWQRNRTDSKLQEQVRNQLIATNTFIEFAMSSFTVPHYEVILLPIFAQVANLHLLLLRDIEIFGLEWGMSKVEIDDYYFANSGLTGLTQKYTNHIVKWYREGLCIATNIDLGQCPEFYQLDKWNAMNDFRREMTFMVLDIIALWPTYDPIRYPLGIKTELTREVFTPLLGINPNSSSLIHTMEEIEDKLTFLSPFLSWISFEQLVKQGDGISTFTDWGNFTLSNTMLPISYILGGAGSGTGDSTNIPIKSENYDVYKVRVGTDYSHPSNVPIRKLEYYCTNGTMENVITVGTSTTNALFELPNNGYIDYSHRVSRLSCSNVEVYEWEGGPKYALKNIAYGWTHISVDSKNTLSANAITQIPARKGYSSSESNLSIAGPYFTGGDLISLPPNGAQLQMRVTPPVSSSTTNYCVRLRYASSGNTNIYVERVLSSGDTYGETHDIPATYSGGSLSYSSFAYVVNLTAIFEGFNVEIKIKNIGSSQIILDKIEFLPI

SEQ ID NO: 297 - protein, 208 aa, Bacillus sp.
MNLDNFNMLTDISVVNQAKTLVSKFDDAIKIISKDTDNKFQGGTEIDAEIVRKIARDLKKGGLEFFQYKEKTSTNVQVISHINAVFIMLYDLIGNTITNENFLVQDVLKKIVIDLFTNLNSKIQSQCETTKKQSAFVTHYIKGEKISYTHNQIFCYQSGFYLKMMLMSSKVTILSKSLDLLVLKPFDIATVSSTTNVIQVFQKIGAEW

SEQ ID NO: 298 - protein, 267 aa, Bacillus sp.
MSMNANVTDLIELFGRYANQWSQQHGGGNSKVSLILPGFENLAYTSFTQPVKYDEPTINMLEDVAVASNIYTNTGNQPLNVTIGLMGALKNWLQLKVNEGTSEAGKRFLNIKLPNHIPSFSNEQLVPLGGAIHENSRMQSWEVNHPFTINPKFKVTATLMIKTKKITQSFEIKRILSRYVAIHTSQAINGHLVSLHHVSRILKDYFSPYIQVDGNKVNVIDKGELQSLFGIEQYIHIQGRSLSNPNIKEDYNIYNPETSVKQNFKLS

SEQ ID NO: 299 - protein, 265 aa, Artificial Sequence
  synthetic
MNANVTDLIELFGRYANQWSQQHGGGNSKVSLILPGFENLAYTSFTQPVKYDEPTINMLEDVAVASNIYTNTGNQPLNVTIGLMGALKNWLQLKVNEGTSEAGKRFLNIKLPNHIPSFSNEQLVPLGGAIHENSRMQSWEVNHPFTINPKFKVTATLMIKTKKITQSFEIKRILSRYVAIHTSQAINGHLVSLHHVSRILKDYFSPYIQVDGNKVNVIDKGELQSLFGIEQYIHIQGRSLSNPNIKEDYNIYNPETSVKQNFKLS

SEQ ID NO: 300 - protein, 296 aa, Unknown
  Unknown organism from environmental sample
MAIVDLDAYLLALVKKTHPLGPIFHGVNTSHLSIKNAESYGFKIENSKPQGTMFMGESELKNDTNETQTIHSDSFTKTITDSVTLSVTNGMTAGVSVTISGKIFGIGAESSMSFEVSTSTTNEQTSEESVAYTVPSQTVVVPAKKTYYVYTALQRSQLEGSIRLRADLSGELLVAMKFGDSEIYLMLGDMYEYIKTHQLSHPLPSGISLNHNNKSIHFEGVAQYLYGTGTKFNVTITDTPSSQGIQEHKPFDAKTGLGTYEIQLDGKKLGFDINDLKEQMEPEVFEKLKELQNEIV

SEQ ID NO: 301 - protein, 250 aa, Unknown
  Unknown organism from environmental sample
VNSFRYKTRLMKGECKMASIYLKENEYIRNLSNSPYRRITLKVPCENKRNLKNIFQVEPQYINQALTASHAFQGAIDSNLHFNYERAYQIGVNMPGRDYDPSMWGINQPVIQETLQVSTMINQLKSSLNRFLYFIDISNELFWNEVESAIVNTFTNLYTQQNSAWIFYHSSTSTSTSYYYNIMFALQDSNYRTMTVIPIAFDITVRLEKQKVLFITLKDRAEYRVTLKSIWVRLILQKTHGKQLVDCFNF

SEQ ID NO: 302 - protein, 234 aa, Artificial Sequence
  synthetic
MASIYLKENEYIRNLSNSPYRRITLKVPCENKRNLKNIFQVEPQYINQALTASHAFQGAIDSNLHFNYERAYQIGVNMPGRDYDPSMWGINQPVIQETLQVSTMINQLKSSLNRFLYFIDISNELFWNEVESAIVNTFTNLYTQQNSAWIFYHSSTSTSTSYYYNIMFALQDSNYRTMTVIPIAFDITVRLEKQKVLFITLKDRAEYRVTLKSIWVRLILQKTHGKQLVDCFNF

SEQ ID NO: 303 - protein, 1308 aa, Unknown
  Unknown organism from environmental sample
MNGGEKMNQNNQNEIEILDTASNNLGQSSGYPRYPLAKDPKVPFKNSNYKDWLANCEESNVEPLLTEEDLRNALFTSISVTAWLSNYLGLGPIATGLNILGRVLGYLWPNPNELNWVNLIRVVEALIAREIAQFAIDNATSKLQGLRSVVSIYNTAFNHWNASEASRRDDALKERVRTTFADVDSALAEAMPQFRQERYEQHLLLVYAQAANMHLLVLRDAVIHGEAWGYKPVTVDEFYDRQVCLIDAYTEHCMTFYRQGLQDLRNRGNWNAFNNYRRNMTITLLDLISFFSNYDGRVYRTSTPIQLTREIYTEPNATPQWLNYNFNASQFNQIENDLIRQPSLFTHFSESTLDAATLFLVDFSDEPVPGITRFNIRSSTSLPNPIQSTSPWFGFPTSTPNQSFRIGLTESGSIFRIRSTATTHNYGSQFGNWRTGITRMVSYVTNGIETGTLDFNLATRYGIRTIESYLPGTNSSSEYPTADTYTHRLSWISASRVGFLQGFVTAYGWTHISAEKTNRLLPDRITQFPAVKSAIFSVSTGNRVISGPGHTGGALLAMSGFAALLMYFNSPSRQRYRLRIRFVKDFNNVTLRAYSSDIGFNQSFVLPGSGAAVNPNLSVRDFRYVDVPGNFELMANRTYSLNIDTISNVTGTCLIDKIEFIPVNSTTLEYEGKQNLEKAKKAVDNLFTNTGKNALKVDTTDYDVDQAANLVECVPEKLYAKEKMILLDEVKHAKQLSASRNLIQNGNFAFYTDEWTTSNNVSIQAENPIFKGNYLKMPGASETEGGTTRFPTYVLQKIDESKLKPYTRYKVRGFVGSSHDVRLIVERYGKEVDAILNVRNDLALDTVAPSHIQANQCQSQPYPIIQDGCLTNVIDPNYYEGTPSGHANFKKEHGMCHQSHQFDFHIDTGEVYINKNPGIWVLFKISSPEGHATLDNIELIEEGPLVGESLALVKKREKKWKHEIETRWLQIKEVYEKANREIDALFTDAQGQALKFDTNISHIISAEHLVQSIPYVYNKWISDVPGMNYDIYTELGRRITQAYSLYERRNIIKNGDFDHGLNHWHATPHAKVQQTGGTAVLVIPNWSSNVSQNLCVEHNHGYALRVTAKKEGPGKGHITISDCNGNQETLTFTSCDNYVSSEITNDQSEYHYSQEMNEQRGYTPNGTINEQLNYSLDQVRNEQRCYTRNEITNDQSEYHYSQEMNEQRSYNPNEIINEQLDYSLDQVRNEQRCYTRNEITNNQPEYHYSQEMNEQRSYNPNETINEHRNYVTRTIHFFPDTDQVRIDIGETEGIFKVESVELICMEGQ

SEQ ID NO: 304 - protein, 663 aa, Artificial Sequence
  synthetic
MNGGEKMNQNNQNEIEILDTASNNLGQSSGYPRYPLAKDPKVPFKNSNYKDWLANCEESNVEPLLTEEDLRNALFTSISVTAWLSNYLGLGPIATGLNILGRVLGYLWPNPNELNWVNLIRVVEALIAREIAQFAIDNATSKLQGLRSVVSIYNTAFNHWNASEASRRDDALKERVRTTFADVDSALAEAMPQFRQERYEQHLLLVYAQAANMHLLVLRDAVIHGEAWGYKPVTVDEFYDRQVCLIDAYTEHCMTFYRQGLQDLRNRGNWNAFNNYRRNMTITLLDLISFFSNYDGRVYRTSTPIQLTREIYTEPNATPQWLNYNFNASQFNQIENDLIRQPSLFTHFSESTLDAATLFLVDFSDEPVPGITRFNIRSSTSLPNPIQSTSPWFGFPTSTPNQSFRIGLTESGSIFRIRSTATTHNYGSQFGNWRTGITRMVSYVTNGIETGTLDFNLATRYGIRTIESYLPGTNSSSEYPTADTYTHRLSWISASRVGFLQGFVTAYGWTHISAEKTNRLLPDRITQFPAVKSAIFSVSTGNRVISGPGHTGGALLAMSGFAALLMYFNSPSRQRYRLRIRFVKDFNNVTLRAYSSDIGFNQSFVLPGSGAAVNPNLSVRDFRYVDVPGNFELMANRTYSLNIDTISNVTGTCLIDKIEFIPV

SEQ ID NO: 305 - protein, 848 aa, Bacillus sp.
MKYQDRLKAKRTYKQAVLATVATMTLGVSTLGGMTSAFAAEKDSRQQLATDTPQMKGEYYAGNSSTALEKSMSSIMKGYSKNTKMGAIVDATIKTDINPLVTAAYKDQISYNNIAKNVVTTGISTIPYVGSALNTLIGLFWPDTSISPQNTFNLFKPQIEQLVDEKIDNYDTAALQEKYNGMKKNLTEFVERLDQLDPTYYEDGPQAELLRRVSAINADFNNMLAEFKKEGHEVTELPAYTQFAQIHVLFLKYVILHSDKMNMHQDNVDNYKKDLKRDIAEYTDHIQRTYEKGLKQVQEKSVPVEGFGHIGDDEKKYPGTQKWNQVNTYTRTMTLSALDFVPLIQLTDPDLYPGAVDASQASTRPIFSDIVGQVASNNDSKPTTYEDIEGRTRNWEYSGILSKLGIQSGDRVDVIKGWNSKSGYYAGGNQSSGAPAHYVEISENDPIKRIEMNGQISLQSITYETLSGNRESFGSASRETKHYEFDYDGQQLERLTAFGSYNHPGFNSVDAAVASFVPISLRSNNPISPTAITQISAQKNAKHDGTVSCGGIGEGGNGIEFYKSGSSVDYAVDVAAAGKYKIRYRANSSTPTDLQLNKGTTTKIDSKEVRVYDGPIIDLKEGENTLTLAKTNDGDAAIYQIEFVPVDVKVDPNKVDPNPPYNPDAIKELLKASGWVKENGKTFYKGTKGDGTDVPVGEYATGVHKIGGDVYYFSQKGDGRSEEVGEQVSAAKGGWINAGGRTFYVAKHGDGSGVYPGLVATGLHKIGGKLYYFVEEGVDATGSNQDYHPGGLGSKVEGAGWILKPNLNIYIGYKGDGTEVENGTVAAGRDYKIDGINQRFGEDGQWSR

SEQ ID NO: 306 - protein, 608 aa, Artificial Sequence
  synthetic
MAEKDSRQQLATDTPQMKGEYYAGNSSTALEKSMSSIMKGYSKNTKMGAIVDATIKTDINPLVTAAYKDQISYNNIAKNVVTTGISTIPYVGSALNTLIGLFWPDTSISPQNTFNLFKPQIEQLVDEKIDNYDTAALQEKYNGMKKNLTEFVERLDQLDPTYYEDGPQAELLRRVSAINADFNNMLAEFKKEGHEVTELPAYTQFAQIHVLFLKYVILHSDKMNMHQDNVDNYKKDLKRDIAEYTDHIQRTYEKGLKQVQEKSVPVEGFGHIGDDEKKYPGTQKWNQVNTYTRTMTLSALDFVPLIQLTDPDLYPGAVDASQASTRPIFSDIVGQVASNNDSKPTTYEDIEGRTRNWEYSGILSKLGIQSGDRVDVIKGWNSKSGYYAGGNQSSGAPAHYVEISENDPIKRIEMNGQISLQSITYETLSGNRESFGSASRETKHYEFDYDGQQLERLTAFGSYNHPGFNSVDAAVASFVPISLRSNNPISPTAITQISAQKNAKHDGTVSCGGIGEGGNGIEFYKSGSSVDYAVDVAAAGKYKIRYRANSSTPTDLQLNKGTTTKIDSKEVRVYDGPIIDLKEGENTLTLAKTNDGDAAIYQIEFVPV

SEQ ID NO: 307 - protein, 810 aa, Artificial Sequence
  synthetic
MAEKDSRQQLATDTPQMKGEYYAGNSSTALEKSMSSIMKGYSKNTKMGAIVDATIKTDINPLVTAAYKDQISYNNIAKNVVTTGISTIPYVGSALNTLIGLFWPDTSISPQNTFNLFKPQIEQLVDEKIDNYDTAALQEKYNGMKKNLTEFVERLDQLDPTYYEDGPQAELLRRVSAINADFNNMLAEFKKEGHEVTELPAYTQFAQIHVLFLKYVILHSDKMNMHQDNVDNYKKDLKRDIAEYTDHIQRTYEKGLKQVQEKSVPVEGFGHIGDDEKKYPGTQKWNQVNTYTRTMTLSALDFVPLIQLTDPDLYPGAVDASQASTRPIFSDIVGQVASNNDSKPTTYEDIEGRTRNWEYSGILSKLGIQSGDRVDVIKGWNSKSGYYAGGNQSSGAPAHYVEISENDPIKRIEMNGQISLQSITYETLSGNRESFGSASRETKHYEFDYDGQQLERLTAFGSYNHPGFNSVDAAVASFVPISLRSNNPISPTAITQISAQKNAKHDGTVSCGGIGEGGNGIEFYKSGSSVDYAVDVAAAGKYKIRYRANSSTPTDLQLNKGTTTKIDSKEVRVYDGPIIDLKEGENTLTLAKTNDGDAAIYQIEFVPVDVKVDPNKVDPNPPYNPDAIKELLKASGWVKENGKTFYKGTKGDGTDVPVGEYATGVHKIGGDVYYFSQKGDGRSEEVGEQVSAAKGGWINAGGRTFYVAKHGDGSGVYPGLVATGLHKIGGKLYYFVEEGVDATGSNQDYHPGGLGSKVEGAGWILKPNLNIYIGYKGDGTEVENGTVAAGRDYKIDGINQRFGEDGQWSR

SEQ ID NO: 308 - protein, 318 aa, Bacillus sp.
MKKYKKLAVAMPLAGMIMSGVGVLGGPASSFADMMPQAKIAAMHTTLAANTMNENAQLQKDLSNYFGGEVSNIQVEPIIDSNTTPRLEITKATPTDPSSDTIELASNHNISNVFQTYKTPEKKVTTTTSLEITNEGEFHTGLKSETTFKMGVPFFGEGEEKVTAELDVTYKRGSVDKTEKSTEITYPSQTINCAPGGTTTLISKVQETLFEGKYTGKAVITGFDVKHADGTTRTFNPLAMAVYEAAQKVGGKELPSSVESNKDGLIVKNMTTTFTGKAGHTSQAEIKFIPDDKSKQSVTMPLAEYNQKVAAGISLYAK

SEQ ID NO: 309 - protein, 287 aa, Artificial Sequence
  synthetic
MDMMPQAKIAAMHTTLAANTMNENAQLQKDLSNYFGGEVSNIQVEPIIDSNTTPRLEITKATPTDPSSDTIELASNHNISNVFQTYKTPEKKVTTTTSLEITNEGEFHTGLKSETTFKMGVPFFGEGEEKVTAELDVTYKRGSVDKTEKSTEITYPSQTINCAPGGTTTLISKVQETLFEGKYTGKAVITGFDVKHADGTTRTFNPLAMAVYEAAQKVGGKELPSSVESNKDGLIVKNMTTTFTGKAGHTSQAEIKFIPDDKSKQSVTMPLAEYNQKVAAGISLYAK

SEQ ID NO: 310 - protein, 358 aa, Bacillus sp.
LQKHYKKLAVIIPLTGMLSMSAVAPVTSFAAETQKADVSSQEGLVQGYLMENGKMTPVYKNKLTKFDTAGDIEPDLPQLSPNPYDPVPDHGTVYGESANIGNVIYFRSVPNTANGGYVGATHHVFLPIDAQKYPNIGYFIEKQPDGTIRDGYYNPEDLSLIVDSNDAVSHVSLGLDEVYGAIWDGTTKVKRETRYQLVKPALLDNAGVFNFNETRTSGIATANMFGMAATIGWKIGLKAGIPGIVDVSSEISGSLTASYQHTVTVTKQVSELVGFSIGRVDNPDYQYNDYAAAVYQIQSDYTMEPGKGLSSVIGQDSDLKSDSKSWYWRTAALADTDYLYQGAKYYFAATPGSHKKSQ

SEQ ID NO: 311 - protein, 358 aa, Artificial Sequence
  synthetic
MQKHYKKLAVIIPLTGMLSMSAVAPVTSFAAETQKADVSSQEGLVQGYLMENGKMTPVYKNKLTKFDTAGDIEPDLPQLSPNPYDPVPDHGTVYGESANIGNVIYFRSVPNTANGGYVGATHHVFLPIDAQKYPNIGYFIEKQPDGTIRDGYYNPEDLSLIVDSNDAVSHVSLGLDEVYGAIWDGTTKVKRETRYQLVKPALLDNAGVFNFNETRTSGIATANMFGMAATIGWKIGLKAGIPGIVDVSSEISGSLTASYQHTVTVTKQVSELVGFSIGRVDNPDYQYNDYAAAVYQIQSDYTMEPGKGLSSVIGQDSDLKSDSKSWYWRTAALADTDYLYQGAKYYFAATPGSHKKSQ

SEQ ID NO: 312 - protein, 329 aa, Artificial Sequence
  synthetic
MAETQKADVSSQEGLVQGYLMENGKMTPVYKNKLTKFDTAGDIEPDLPQLSPNPYDPVPDHGTVYGESANIGNVIYFRSVPNTANGGYVGATHHVFLPIDAQKYPNIGYFIEKQPDGTIRDGYYNPEDLSLIVDSNDAVSHVSLGLDEVYGAIWDGTTKVKRETRYQLVKPALLDNAGVFNFNETRTSGIATANMFGMAATIGWKIGLKAGIPGIVDVSSEISGSLTASYQHTVTVTKQVSELVGFSIGRVDNPDYQYNDYAAAVYQIQSDYTMEPGKGLSSVIGQDSDLKSDSKSWYWRTAALADTDYLYQGAKYYFAATPGSHKKSQ

SEQ ID NO: 313 - protein, 395 aa, Bacillus sp.
MILTKVFFRVCAFFCFVIIKSVPHKYIYKGNEAYMKKKIYSKLATAVPIMCLLSTPILNPVTTFAATSTVNSTSIQGYLFDTKSGIRTPILLGQTSIQNRAENILIPTLPKNPYDPIPKEGTTSTESTLIGNIIYMKKYDKNTKEEVGYFLEKVQDSSGKEYVKGGLYDLKDPTNINKMQYTTIFSKDPINDGGLSGIITGMTNNEEISDTVSIIVRKVNLLPLFEETKIKRDTKFELIDSALPSVTNKYTFSQSVTTGISKSEVFSLSATIGYKISMEAGGGPVPAKTTHEFSTELSASYSNSITIESSETKTKTNEYSVTDPKYASTNYQHYATAAYQLKSTYTLLPSASLNKYLKEHEYVLSSESYKYADTTVIYLQTPGTEKLPTENKKYE

SEQ ID NO: 314 - protein, 361 aa, Artificial Sequence
  synthetic
MKKKIYSKLATAVPIMCLLSTPILNPVTTFAATSTVNSTSIQGYLFDTKSGIRTPILLGQTSIQNRAENILIPTLPKNPYDPIPKEGTTSTESTLIGNIIYMKKYDKNTKEEVGYFLEKVQDSSGKEYVKGGLYDLKDPTNINKMQYTTIFSKDPINDGGLSGIITGMTNNEEISDTVSIIVRKVNLLPLFEETKIKRDTKFELIDSALPSVTNKYTFSQSVTTGISKSEVFSLSATIGYKISMEAGGGPVPAKTTHEFSTELSASYSNSITIESSETKTKTNEYSVTDPKYASTNYQHYATAAYQLKSTYTLLPSASLNKYLKEHEYVLSSESYKYADTTVIYLQTPGTEKLPTENKKYE

SEQ ID NO: 315 - protein, 444 aa, Caulobacter sp.
VSPSRGGTRIPASKAMSNQPDTFPNPEEIVRAAIKDGGFGKTGVLFRPFMLKTFDFGAHFESVWIARNFAERGEPYPNVEFYRFRGGTGPFLPFGDFIVAGDGRRRLAPPPGLFLFAPGEEQSDCLRHPVGHEWILNDRGSRNPRDLSYWRLIPPRGYTALGITFGVEQPKYENYWCVKNEYLEAADRRDAWHHDSAWYNNGGLSRPVMPDKPPPENDPILWFIPPTFVSDQGQEPTKLLKLGMAELPVETFSVKPEYDPEVASEDETAPGLKKVAIVPYTGVAADADYPDQALVSPFYFMACEPLWHCDSTLNAPEGGSQSVTQTTGVSKTDSTSFSEQTSFTVDCNVGLALDAVNLGLNASFTKSFSLTTDHSKTQTTDCSRTVSIEFPQSNLIAIWSRRQKIALFRMDGSVVSRIQYSTYDQRIVCEQSNEEVKPEPALAD

SEQ ID NO: 316 - protein, 167 aa, Artificial Sequence
  synthetic
MPYTGVAADADYPDQALVSPFYFMACEPLWHCDSTLNAPEGGSQSVTQTTGVSKTDSTSFSEQTSFTVDCNVGLALDAVNLGLNASFTKSFSLTTDHSKTQTTDCSRTVSIEFPQSNLIAIWSRRQKIALFRMDGSVVSRIQYSTYDQRIVCEQSNEEVKPEPALAD

SEQ ID NO: 317 - protein, 971 aa, Bacillus sp.
MQKKMNDNVEHLQTRDLLENSITNFDVYNAIIEQNYKHILKDVVEQNYTSATYPVLKNISTGTIGLTGTIVGMIATGGVASIAKIGFSLLSTTFNIFLDVNKPSESATAVWEKIKKYAEEYVGKEFDVNQFNRLMSELDGCKDSVALYLDYRKKADPAALYYCRSAIALFTQRISTFQQKGYEILSLPLFVQVARLLLLLYRDLVLYGESWNISPDDRAKDKKMMKKLIKQFSEYAFFTYLSGLEDMQQDETKIWKSPCCDINQDRKLQEKVFPFTKHWNAINQYKQGMQLSVFDIVAQFPTLDPETYPLIGTNIKQSREVFSRITGAIIKKEHLVEPSQTNVSTMEQIDNLLPAGYEGELIDVRTKVGKLTPPIGYGNIKYPLYSMDQVIDKVTGAAMGKSYRVGPFKPSEETWFPSNHIVPLDMVGSCCDTEHGLVNNFYAGSSMVAFPPEKIKCKINPDKHKLSSVTLLGTFKTWHQVDWPLESYGFISSGLICGFRQSDLNPKHILSSSLITQIPAEMNANNGRKGFRNVSENITGQNVMRAQTNGSYLEYDVFGIENATTHCEIRLYLSYGGNRNSSIDIAVSHLEPNSQGCEWHMGKEQKIGNIPLDISALVDNSIRGMNGYYSLTKKVPIIFGKERSKIKLAFKSDNDLNTVMIDRIEIIPVKTETEISGKNGKVFFTVHQNGKLEAEAMGDIAIDGVDSKKTWKVFVCGQDKFDNKGEMKELIFYGQEKPKDIASTFNKIFSESTSEWIIPGNTLSVLDFTEPPIPQETIPLGKYNNQKKILELVKVNDIKNEQLLMRKTATASEADLENEVGKDYSVFAGGKLVYRCKKGTKFKTVMNAFNALNIRAYSAKIVEDNEKMNPKDTAKDMIDDLFPRTDNNKPDYANCVKPHIVSYDTRVAKNALRTMHKNNIPIPDDFYTNLRLAEEKIFTRENSQACLTDNNNITTMLGLRGKDGKCVQGKN

SEQ ID NO: 318 - protein, 669 aa, Artificial Sequence
  synthetic
MQKKMNDNVEHLQTRDLLENSITNFDVYNAIIEQNYKHILKDVVEQNYTSATYPVLKNISTGTIGLTGTIVGMIATGGVASIAKIGFSLLSTTFNIFLDVNKPSESATAVWEKIKKYAEEYVGKEFDVNQFNRLMSELDGCKDSVALYLDYRKKADPAALYYCRSAIALFTQRISTFQQKGYEILSLPLFVQVARLLLLLYRDLVLYGESWNISPDDRAKDKKMMKKLIKQFSEYAFFTYLSGLEDMQQDETKIWKSPCCDINQDRKLQEKVFPFTKHWNAINQYKQGMQLSVFDIVAQFPTLDPETYPLIGTNIKQSREVFSRITGAIIKKEHLVEPSQTNVSTMEQIDNLLPAGYEGELIDVRTKVGKLTPPIGYGNIKYPLYSMDQVIDKVTGAAMGKSYRVGPFKPSEETWFPSNHIVPLDMVGSCCDTEHGLVNNFYAGSSMVAFPPEKIKCKINPDKHKLSSVTLLGTFKTWHQVDWPLESYGFISSGLICGFRQSDLNPKHILSSSLITQIPAEMNANNGRKGFRNVSENITGQNVMRAQTNGSYLEYDVFGIENATTHCEIRLYLSYGGNRNSSIDIAVSHLEPNSQGCEWHMGKEQKIGNIPLDISALVDNSIRGMNGYYSLTKKVPIIFGKERSKIKLAFKSDNDLNTVMIDRIEIIPV

SEQ ID NO: 319 - protein, 314 aa, Unknown
  Unknown organism from environmental sample
MAITDVNAAAVDVSKWFVETNNNADPNTVNVSFYPYITKNPIAVPTQTSFETYPKPLASSIQILTNNSSVEQTQTVSFSETLTETTSSSTTEGYSTGQNISSASTFTSAVTTRFSSIGFEHTFLVETNSDYNHSSTEEISKSVERQWNVSQSVTVAPYSQVTSTLVIFGADLSIPIEITATILGQGVAQGFTVLYTNSTYYKLSGGSYSQALLASQMYQPSCPAMPACFASYNVHSGELFLKGVANTGITPGLYATVRYDETSLPGSPNTSAPRSWYSNEVLLRDGTIAIIPDIDPKTGTVIPSKNGPKEVQRS

SEQ ID NO: 320 - protein, 342 aa, Bacillus sp.
MKIKQIILTTGIALTVGIISSGTTITPIWADTIDAHNRGVFQKYVQDSAKLNGIWGAVRDGVYTNMFSLSSIRTTKFHVTSVNKEPLMIDTARLDNSKGKEPIEFPAPNKTHTETESLTVSAGVEVSLGFEIEATAGIPGVASMTSKLTGGVKVSTGFQELTSTTTSISYGGLGSIIKANPGEIAGYDYMINRTKASGIMNTGQKITEIGPELEVWNINRYYANDNVIERSISIPGVKKGIEVYNYFKQLQQWNINENRDIAILWTPQGHKNPAIIPGGQLGAFVFIDDENKNVYTVENQRSFNAVSGTDFTAVPVKINPHTGQVQTDLMKPQIQKHLEYTK

SEQ ID NO: 321 - protein, 313 aa, Artificial Sequence
  synthetic
MDTIDAHNRGVFQKYVQDSAKLNGIWGAVRDGVYTNMFSLSSIRTTKFHVTSVNKEPLMIDTARLDNSKGKEPIEFPAPNKTHTETESLTVSAGVEVSLGFEIEATAGIPGVASMTSKLTGGVKVSTGFQELTSTTTSISYGGLGSIIKANPGEIAGYDYMINRTKASGIMNTGQKITEIGPELEVWNINRYYANDNVIERSISIPGVKKGIEVYNYFKQLQQWNINENRDIAILWTPQGHKNPAIIPGGQLGAFVFIDDENKNVYTVENQRSFNAVSGTDFTAVPVKINPHTGQVQTDLMKPQIQKHLEYTK

SEQ ID NO: 322 - protein, 1226 aa, Bacillus sp.
MLSNFGSLLIKFAPKEIPYTVQTQLFGRDVDLLSDRENLITDIQPGHYTLSLPTFIRNNRRYIPINPSPSLDIMADGTTMLVIDYDDVPVSEATDTDGDGISDDLEIGGYIINNYIPGPAYNPDGTPVDPNKIIYRSDPANRSTTRDPYNDYMKTTGLNMDATVEDHAERQPLVAAHPTVKVEVVDVLVTPKLTISDKSGNKISTLQSEAIGKTITNTVTSGWNIGAKLGGKITIKPEKGKPPGEVNFEVSGGYNQSKSEATSTSNTKTTSQTEEFNWETAVTQDTVQTASIRFNLKITNVGTASIKQPRPTFNVKLGGKVIATIQFDQVPIAPDLILQPGQSSPVVSTPSTDTRETVWLTLDQLKAFELGEPIEIEVVSISGIYMTYSNGTWIDGTSWASHLAQIEEYTATIAFENKTGVVKKYRVAANRGLSTDWQPNVDIAEALTLSVGASEDENGVYIGGSAVDERWSIYISNVNNPNRYQEVLDELAQLDLTTEGILQVKLKAKDYVTVIEPSDSPVPIITYAQYSNDYKNVTVAVTVGSYPIKNVEATVRILGSIVNVPLTYNPSTGFWSSPTPFTEVADGSYAGIITAYDQQIDADGNPAPGIGEGAISQPSYFPGALTYFPTSIGEVGKNLFTSSGVSGSYAITPVSGSKLDVLSLETIGFSSNNSFFSIPNQTIFTSANDQRLIDMELKLQEWDDGTVNTVSGNYEAHNENLGSAYGDEMRKIWLERVGNYSKSVIPAKSYNLAAYACHVYQCDVIGADNSSIDSWFDINSFIAAYSGKLETRKLPNDMKIDLIVTNDKTYSVTMSGGLTNKYFDHTTTPRIPQEVYASNVWTDKITINRNGHNLPVFIKVGGESGDGDYAWYLPLYFPPGVTTIDINSKYQSVHLLSLDVYILKEGNQYVLGAKNGTNRQSPPASKMAFLSHSSNPQTSISWSMNPYKESGADLPATSSGQQVQVKRLGYFKEYNGSTTGDTQSLGSKLQVFPAKQSYPYNPGGSYSLAVQGVEHTPTAFLLEVISEGCDPYFNVKINEVTSYLGKADMRTVQDGLTYQAPNHSEIIMVPSANNSANLSIVTSNFTKGRLIVNVIGYFNESEGCFYKKLDIPISVQQNGTNALEQTLNFKPKAYILKANIQGGYTRDAYLSINGQDTIKLGISNANSEAEYETLNLGNNFTNNNYTGTGVYVPPAGSEYHLPWEIKNLWNQDKLKEKKLEIIGYFA

SEQ ID NO: 323 - protein, 199 aa, Bacillus sp.
MNREVYYPEDDNNHDHLLTDIEDFPSLSAEESYSSSKSFAVEKEVSHDVPFCCVINIPPGFEYVPQGKNKIVYCLDQLSVIKEICMKTINVERVGPVEVNLNILKVMGCIPFVINAELRGECGEYCDTSLDPRNHIFIGDSGSLCVNNILKLSVATIPDYQLNGHNVIVSAFNVTPVYEAGCHLLRISGKFSFQNIPQN

SEQ ID NO: 324 - protein, 375 aa, Bacillus sp.
MIIGMVTKAITPKLGALPDFIDDFNGIFGFMSGITDVMGTIFGVNTGDSSIDNVMNNEALLKQMMDQMNAMQSSLDDILKNQEMSEVLQHMLVNLSNEQLDLSKSINVELGKIEGILTTYLPAISSMLNNIYSQTSEINQKVDKLLALMTFALQELEYIKDNVILNSSVIEITPHVQKLVYVNKKFLELSGSYMRGDISIDNMQELIQWAKSIVDTDMNSFEFSIDSLHNTILGDNLYKRSAIKTFADVLMDDDSKFGDFGTPLAKFYTFFSSLATLQINAYLCLTVARKVLGLPDIKYQLTMQERIEQQNQLFLNIIQDQKISNYLEVKGTYSMNSQYVEKFITSDLQAKDGYALIGLEFFVDNGIGSGAKTSR

SEQ ID NO: 325 - protein, 371 aa, Artificial Sequence
  synthetic
MVTKAITPKLGALPDFIDDFNGIFGFMSGITDVMGTIFGVNTGDSSIDNVMNNEALLKQMMDQMNAMQSSLDDILKNQEMSEVLQHMLVNLSNEQLDLSKSINVELGKIEGILTTYLPAISSMLNNIYSQTSEINQKVDKLLALMTFALQELEYIKDNVILNSSVIEITPHVQKLVYVNKKFLELSGSYMRGDISIDNMQELIQWAKSIVDTDMNSFEFSIDSLHNTILGDNLYKRSAIKTFADVLMDDDSKFGDFGTPLAKFYTFFSSLATLQINAYLCLTVARKVLGLPDIKYQLTMQERIEQQNQLFLNIIQDQKISNYLEVKGTYSMNSQYVEKFITSDLQAKDGYALIGLEFFVDNGIGSGAKTSR

SEQ ID NO: 326 - protein, 177 aa, Bacillus sp.
MGVPFFGEGSEKVTVDLDVTYKKSLEETYENSTEVTFPSQTINCAPHGKTTFFSQVQETAFDGTYTGKAVIKSFDLKLNGDKKTISKDDIYDFYALKSGLMKQGSTYSSLPDSLEADESNKQILVKKHVVSFTGKAGHLSQAKVTFTPEGSQQKTVTMSLDEYNEKLAAGLPLFEKP

SEQ ID NO: 327 - protein, 522 aa, Streptomyces sp.
MKTIRSRTAGLLLAPAVALGLLAPILAAAPAGAAPVGAAVDETYTFTNSDGTLNSTGNNDGNQISVTPDGTNYTQWRLIKLSAPGQFNIASTASGKCIYATQPATQKSCGQDGQQWHFRPVDGKPNTFGIVRRAETGTEYCMDNRGGLHLWGILAQPNVCNGSASQQWTLPEYKAAEARSLALDYYSDLCSKKTSTCSWKQRSEGQPEVLPRRPASSVWFNDTSATMTQIFTTIYHSGWAQSFSAGLSTSVGVSTPVQAMISNQLTATQTYTSDESTINGISVTVPPKSYAWVDFAAVGKKVTGTWTFDTDNQPWTADATVTVPVINSTVGTTMYVARTSASPPGSGSTSDDVKPAVIAKTASAVMDVPAGGRLTAVQGGVRVSGADGATIATVMPGAVTDTNGVVHKAALAVQGTTVTQTIEGVTGDTITGTMSPPTFSLGDGTPAAYASAQKSSQAMASASFSVSQDSDAYDKCMAAKIGTSIVSGGISGLLGGPPGVAVGMMTGAFSGIVIGTVTCPKK

SEQ ID NO: 328 - protein, 490 aa, Artificial Sequence
  synthetic
MAPVGAAVDETYTFTNSDGTLNSTGNNDGNQISVTPDGTNYTQWRLIKLSAPGQFNIASTASGKCIYATQPATQKSCGQDGQQWHFRPVDGKPNTFGIVRRAETGTEYCMDNRGGLHLWGILAQPNVCNGSASQQWTLPEYKAAEARSLALDYYSDLCSKKTSTCSWKQRSEGQPEVLPRRPASSVWFNDTSATMTQIFTTIYHSGWAQSFSAGLSTSVGVSTPVQAMISNQLTATQTYTSDESTINGISVTVPPKSYAWVDFAAVGKKVTGTWTFDTDNQPWTADATVTVPVINSTVGTTMYVARTSASPPGSGSTSDDVKPAVIAKTASAVMDVPAGGRLTAVQGGVRVSGADGATIATVMPGAVTDTNGVVHKAALAVQGTTVTQTIEGVTGDTITGTMSPPTFSLGDGTPAAYASAQKSSQAMASASFSVSQDSDAYDKCMAAKIGTSIVSGGISGLLGGPPGVAVGMMTGAFSGIVIGTVTCPKK

SEQ ID NO: 329 - protein, 507 aa, Bacillus sp.
MKYQERKKVKRKYKQALVTTVAAMTLGLSVGGSVVPAFAAEPNFQIKQNGDIAIGGEVTGSVQNLVAKATGPALQAAINKQMSTDDLINLGRDMTLATIGLIPYGGAIMSSMIAVVWPTAGPSQLDKMIDAISPVIDAKIDDYDAVSLSAELTDLKNKLRKFEDSVNNKPIDLRSAEESLGDIQSYNRGLASDIEGLFEKLILKSQLQGHEEQELPFYTTIAASHLAFLQYMKENGQNSRIKYEPEPLARGYTAGMVELAQTYKEHIDKISQSAQAKMKGKLNDLNHACLTQGSTDLEENINMMGKGLTLGVLPSTVASSTEKYKTIYNGMQTYAKATNENEAFQLVFKAIVKPKPISLPSNTVSILAKGKNKFVHTYDASGAPHLDANSNEVGDWEKFTLIPMKPEENIYALQAHAGKNENNVLFNNTLDNRAGVLSANGSPTTSYEKDAFKLIPLGGDDYALESVKTGNFVFADFNNGGVLVADSKQIGNWEVFTIKPYQKGQKA

SEQ ID NO: 330 - protein, 469 aa, Artificial Sequence
  synthetic
MAEPNFQIKQNGDIAIGGEVTGSVQNLVAKATGPALQAAINKQMSTDDLINLGRDMTLATIGLIPYGGAIMSSMIAVVWPTAGPSQLDKMIDAISPVIDAKIDDYDAVSLSAELTDLKNKLRKFEDSVNNKPIDLRSAEESLGDIQSYNRGLASDIEGLFEKLILKSQLQGHEEQELPFYTTIAASHLAFLQYMKENGQNSRIKYEPEPLARGYTAGMVELAQTYKEHIDKISQSAQAKMKGKLNDLNHACLTQGSTDLEENINMMGKGLTLGVLPSTVASSTEKYKTIYNGMQTYAKATNENEAFQLVFKAIVKPKPISLPSNTVSILAKGKNKFVHTYDASGAPHLDANSNEVGDWEKFTLIPMKPEENIYALQAHAGKNENNVLFNNTLDNRAGVLSANGSPTTSYEKDAFKLIPLGGDDYALESVKTGNFVFADFNNGGVLVADSKQIGNWEVFTIKPYQKGQKA

SEQ ID NO: 331 - protein, 1001 aa, Bacillus sp.
LFQIMLRYAFQSKFGGSKNMKLKSIFKCLTITAVLSQIAVYPTSSYAVSDNECKIKTEDKKSIQGLVGYHFNDTQFQELDFISLGGQSKLLDKEKINNKDQTVRWIGRIKPSQTGDYIISTSADKNIILQVNGETIINQENVAKPLKLEKDKVYELKIEYRNITDLSSDLQLFWSIDGKEKEEILNENILSPNFSEKESLPDDKRNLLLLSNFNLFDNKFLSSELKDTDKDGIPDKWEEQGYTFKNQQIVKWDDSYLVQGYKKYVSNPYKARTAADPYTDFEKVSGHMPEATKCEARDPLIAAYPAVGVGMEKLLFSKNENITEGGSGTKSTSVTDTNTNTNSVEIGSTVEATLNPFALAKVTVSAKYGHTWTNSTAIQNSESQSWSKQIGINTAESAYLNANVRYYNTGTAPIYDLRPTSNFVFQSSGTSIATITAGPNQIGNSLGPGDTYPKRNQAPISLDKANEAGTVKIAINAKQLDALQNRSEILNIETTQNKGQYATLNDTGLPVTDPSKQWDPIRTNIDKVSGSLMLNLGTSKESLERRVAARNENDPEDKTPEITIREAIKKAFNAKEKEGRLYYIDNNGKEVILDESAVNLVGDEKTQKEIEKQLDQMQDKKIYNVKWKRGMNITLHTPEIYYDFEKHGDTGWYYTYQDNGGYTGKRSGIINSGVSGFAIKELKLKPYTTYTARAYVRASTPDSKNKVLFYIDSTLDGNGKGASHKVDIEGDKWQLIEIGFYTGSHPEDFKKLGLKNNGNVALYFDDVSVSEWKNGENLSNNIATEHKVDRWQTGGNSLSPYQYVQKLYFDKIPNVDVKYEVEWLGKPRGVVEGHDDGNKRYIDITEVSAIGDGYRNTDRIVIYAINKKDPGIKVQVAEWNGPSWSHKLKWNKGFYPEGSYHNGIFLTKVPNFPLKYQVYTTDAHAANPRWSGILPTTPTTLPNETGQWQNGYLINLNIFDGKGIPNKHNVYIFAVDPNNPDLKVLIASYSQANNNYYYPFK

SEQ ID NO: 332 - protein, 982 aa, Artificial Sequence
  synthetic
MKLKSIFKCLTITAVLSQIAVYPTSSYAVSDNECKIKTEDKKSIQGLVGYHFNDTQFQELDFISLGGQSKLLDKEKINNKDQTVRWIGRIKPSQTGDYIISTSADKNIILQVNGETIINQENVAKPLKLEKDKVYELKIEYRNITDLSSDLQLFWSIDGKEKEEILNENILSPNFSEKESLPDDKRNLLLLSNFNLFDNKFLSSELKDTDKDGIPDKWEEQGYTFKNQQIVKWDDSYLVQGYKKYVSNPYKARTAADPYTDFEKVSGHMPEATKCEARDPLIAAYPAVGVGMEKLLFSKNENITEGGSGTKSTSVTDTNTNTNSVEIGSTVEATLNPFALAKVTVSAKYGHTWTNSTAIQNSESQSWSKQIGINTAESAYLNANVRYYNTGTAPIYDLRPTSNFVFQSSGTSIATITAGPNQIGNSLGPGDTYPKRNQAPISLDKANEAGTVKIAINAKQLDALQNRSEILNIETTQNKGQYATLNDTGLPVTDPSKQWDPIRTNIDKVSGSLMLNLGTSKESLERRVAARNENDPEDKTPEITIREAIKKAFNAKEKEGRLYYIDNNGKEVILDESAVNLVGDEKTQKEIEKQLDQMQDKKIYNVKWKRGMNITLHTPEIYYDFEKHGDTGWYYTYQDNGGYTGKRSGIINSGVSGFAIKELKLKPYTTYTARAYVRASTPDSKNKVLFYIDSTLDGNGKGASHKVDIEGDKWQLIEIGFYTGSHPEDFKKLGLKNNGNVALYFDDVSVSEWKNGENLSNNIATEHKVDRWQTGGNSLSPYQYVQKLYFDKIPNVDVKYEVEWLGKPRGVVEGHDDGNKRYIDITEVSAIGDGYRNTDRIVIYAINKKDPGIKVQVAEWNGPSWSHKLKWNKGFYPEGSYHNGIFLTKVPNFPLKYQVYTTDAHAANPRWSGILPTTPTTLPNETGQWQNGYLINLNIFDGKGIPNKHNVYIFAVDPNNPDLKVLIASYSQANNNYYYPFK

SEQ ID NO: 333 - protein, 1190 aa, Bacillus sp.
LRQKKTININEIYIIYKKTTTNMEVGLMGNFNKIDAAGNQLRYPFVKAPYLEIQQCDCKKLVNISSDGELKNLYGTESNFKKGAIIVSGLGWALLGFVPTFGPILAAAAGIANVAIPYLWPDLNDTSNPVPTEEHWTWKQIIDEINNEVDEAVIKITNTKLSSIKNALEVYREAVSDWERDRDNEANRDRVLEQFRITQTILYTEMSAFQIQGYEDSLLGVFVMAATLYFGLLRDGIKFGASWGMSTESGDELDDTYNKFERLANKYTEYCVYWYNKILHDKYQENMGMWNDYNNFRQTMTILVLDVVAIWPTLNPRRYELPIKGQLTRKIYTPMIGKPQKEEPHVLFDATIKSIEESVLPPLNLFSWLQEIDFFTRNPPTNYLYAGYIMKLKTTFGDSYEKQFGQVGNSTKVQIGESDSEVYKMTNVVLKSDNTQLLTFDFNFSNSDCIRVPSSNFSENSSPTDTLINGLSCLKNTPCLYGEPCDLFSEGEICDEPAHYGHRLSWIGSWFDQYDYLYHTIYGWTHRSVDKNNLLDNKKITQIPAVKASTTTGHVIKGPGSTGGDLVKLPTDSYMEINVTIPASALPQTYFMRIRYASPADNNIFFSESINGEYKQLDILATNYSGDLKYNNFDYATVIDIIAPASENEEVCTIKLQNTSNNEFNYIIIDKIEFIPIHESLTFNQEDEILEKLSKMVDDLFATDKKNTLKLRVTDYHIDQVARQVECMSDKIYWQEKIILLNQVKLAKRLSKSRNLLKYGDCNLISNSEWKKSNRVFVTSDNPIFKGDCLKMLGASQLQFSNDFSPTYLYQKIEESNLKPYTRYIVRGFVERSKNLEILISRYDNEVHKKINIPNYTSSINPDFKMYNGEQSVVNLRAYGDIIEMDDVNKRERYPNSNEFEFYIDTGNLDMNQNLGIWIGLKIETPDGMAILNNLELIEADSLKGEALEYVKECEQKWKQKWIEEQITIKRAEHIAQDMTQRLFTSPHKDQLKRDTTLKNILEAEQSVKMIPRIYNQFLIGGLPVVPGEAFNIFQKLSNEVKIARVLYEQRNMIVNGNFIKGLSNWCSTNGIEVEQIEGLSVLVIKDWSATISQQVSVKSEQRYMLRITARKEGNGEGYVTISDGTEENTETLKFIMYEEEINTMVSENCSGSLRYVTKIVEIFPKTDCMYIEIGETDGEFMVESIELIE

SEQ ID NO: 334 - protein, 650 aa, Artificial Sequence
  synthetic
MGNFNKIDAAGNQLRYPFVKAPYLEIQQCDCKKLVNISSDGELKNLYGTESNFKKGAIIVSGLGWALLGFVPTFGPILAAAAGIANVAIPYLWPDLNDTSNPVPTEEHWTWKQIIDEINNEVDEAVIKITNTKLSSIKNALEVYREAVSDWERDRDNEANRDRVLEQFRITQTILYTEMSAFQIQGYEDSLLGVFVMAATLYFGLLRDGIKFGASWGMSTESGDELDDTYNKFERLANKYTEYCVYWYNKILHDKYQENMGMWNDYNNFRQTMTILVLDVVAIWPTLNPRRYELPIKGQLTRKIYTPMIGKPQKEEPHVLFDATIKSIEESVLPPLNLFSWLQEIDFFTRNPPTNYLYAGYIMKLKTTFGDSYEKQFGQVGNSTKVQIGESDSEVYKMTNVVLKSDNTQLLTFDFNFSNSDCIRVPSSNFSENSSPTDTLINGLSCLKNTPCLYGEPCDLFSEGEICDEPAHYGHRLSWIGSWFDQYDYLYHTIYGWTHRSVDKNNLLDNKKITQIPAVKASTTTGHVIKGPGSTGGDLVKLPTDSYMEINVTIPASALPQTYFMRIRYASPADNNIFFSESINGEYKQLDILATNYSGDLKYNNFDYATVIDIIAPASENEEVCTIKLQNTSNNEFNYIIIDKIEFIPI

SEQ ID NO: 335 - protein, 1163 aa, Artificial Sequence
  synthetic
MGNFNKIDAAGNQLRYPFVKAPYLEIQQCDCKKLVNISSDGELKNLYGTESNFKKGAIIVSGLGWALLGFVPTFGPILAAAAGIANVAIPYLWPDLNDTSNPVPTEEHWTWKQIIDEINNEVDEAVIKITNTKLSSIKNALEVYREAVSDWERDRDNEANRDRVLEQFRITQTILYTEMSAFQIQGYEDSLLGVFVMAATLYFGLLRDGIKFGASWGMSTESGDELDDTYNKFERLANKYTEYCVYWYNKILHDKYQENMGMWNDYNNFRQTMTILVLDVVAIWPTLNPRRYELPIKGQLTRKIYTPMIGKPQKEEPHVLFDATIKSIEESVLPPLNLFSWLQEIDFFTRNPPTNYLYAGYIMKLKTTFGDSYEKQFGQVGNSTKVQIGESDSEVYKMTNVVLKSDNTQLLTFDFNFSNSDCIRVPSSNFSENSSPTDTLINGLSCLKNTPCLYGEPCDLFSEGEICDEPAHYGHRLSWIGSWFDQYDYLYHTIYGWTHRSVDKNNLLDNKKITQIPAVKASTTTGHVIKGPGSTGGDLVKLPTDSYMEINVTIPASALPQTYFMRIRYASPADNNIFFSESINGEYKQLDILATNYSGDLKYNNFDYATVIDIIAPASENEEVCTIKLQNTSNNEFNYIIIDKIEFIPIHESLTFNQEDEILEKLSKMVDDLFATDKKNTLKLRVTDYHIDQVARQVECMSDKIYWQEKIILLNQVKLAKRLSKSRNLLKYGDCNLISNSEWKKSNRVFVTSDNPIFKGDCLKMLGASQLQFSNDFSPTYLYQKIEESNLKPYTRYIVRGFVERSKNLEILISRYDNEVHKKINIPNYTSSINPDFKMYNGEQSVVNLRAYGDIIEMDDVNKRERYPNSNEFEFYIDTGNLDMNQNLGIWIGLKIETPDGMAILNNLELIEADSLKGEALEYVKECEQKWKQKWIEEQITIKRAEHIAQDMTQRLFTSPHKDQLKRDTTLKNILEAEQSVKMIPRIYNQFLIGGLPVVPGEAFNIFQKLSNEVKIARVLYEQRNMIVNGNFIKGLSNWCSTNGIEVEQIEGLSVLVIKDWSATISQQVSVKSEQRYMLRITARKEGNGEGYVTISDGTEENTETLKFIMYEEEINTMVSENCSGSLRYVTKIVEIFPKTDCMYIEIGETDGEFMVESIELIE

SEQ ID NO: 336 - protein, 306 aa, Streptomyces sp.
MSHSARLRRGRSAVRRAVTASGTLAATGLAAVAVFASAGSSAAAAGHAAAAGHGTAQASPVSAQSARSTRVHISNGTTTTLYRNYSSLSHGVWDDDTPPEAIDGGAAVVWGSHSSGLMTGTEGDVRYSVGNAGEVSIHWDNPYAGSNSYSCTAPSGYTCATTGGGGNNAEVWFTISGKVGAVASRGPRSASAARSTHVTLQNRTPNEMLRTSSSLVHGTWSENLLPPDHVYPMSNAIWQSESNGFATGTQGTAVYNMLNVGTVTVSWDNPYAGSNQYVCSPPDGYSCRQDGGGGDNAAVTFTVLKN

SEQ ID NO: 337 - protein, 641 aa, Bacillus sp.
LLYTQPILQPILKNITSILDVRNMLIKSYNQRGRYIIMKYKDRKNAKRKYKQALLATVATMTLGVSTLGSTASVFAEENTQQQQQQSAMAPATDGSVINIDGSGDIKTDGIVFKKESTDGLVFKRADDGTITVSKEKEKLFNINTLKAIGSLGGATFKQAWADRKAGNFNNTFRTLAMGSAALIPYGGVVISPLIGYLWPENDHEAQAKLKQLMSDIAAQTKTQIADYDVEALGSKLNKLRKDLQEFEGIMNPTGRKIAAAPSVGDEAESTRILVGNIHNDFKNLIEESQKESYKETELPIFMVAATAHLQFLNYLALHGKDPKLNYDDKGLKIAALTPLERAHKEYKEYATEAAKKGLDAINNGRSGAMGIRQKFSGILYDQTIKSFIQGSDRIVKEKFDTTINNIAFKQALGIKSDWTIDQDGRTFYYDPQDNKMQTGWKEISTSFAARIQNNAEFSMKWLKDMGLTYSWYYFSPEKTDKFAKGELYKDTTETINGKTYTFGVDGTCLNPDGGEAAGWHQIGEAWYFYSDGKTKNSEGKTFAKNEKVTGWYKDEKAGRYYYLSPGETKNSDKKVFKAGAMVTGWYQEGNKWYYLTPNPRKNKEGSEFAAGQLIFGTLSIEDKNGEYVQYKFNNDGSLKE

SEQ ID NO: 338 - protein, 604 aa, Artificial Sequence
  synthetic
MKYKDRKNAKRKYKQALLATVATMTLGVSTLGSTASVFAEENTQQQQQQSAMAPATDGSVINIDGSGDIKTDGIVFKKESTDGLVFKRADDGTITVSKEKEKLFNINTLKAIGSLGGATFKQAWADRKAGNFNNTFRTLAMGSAALIPYGGVVISPLIGYLWPENDHEAQAKLKQLMSDIAAQTKTQIADYDVEALGSKLNKLRKDLQEFEGIMNPTGRKIAAAPSVGDEAESTRILVGNIHNDFKNLIEESQKESYKETELPIFMVAATAHLQFLNYLALHGKDPKLNYDDKGLKIAALTPLERAHKEYKEYATEAAKKGLDAINNGRSGAMGIRQKFSGILYDQTIKSFIQGSDRIVKEKFDTTINNIAFKQALGIKSDWTIDQDGRTFYYDPQDNKMQTGWKEISTSFAARIQNNAEFSMKWLKDMGLTYSWYYFSPEKTDKFAKGELYKDTTETINGKTYTFGVDGTCLNPDGGEAAGWHQIGEAWYFYSDGKTKNSEGKTFAKNEKVTGWYKDEKAGRYYYLSPGETKNSDKKVFKAGAMVTGWYQEGNKWYYLTPNPRKNKEGSEFAAGQLIFGTLSIEDKNGEYVQYKFNNDGSLKE

SEQ ID NO: 339 - protein, 297 aa, Unknown
  Unknown organism from environmental sample
MAIFDLDAYLVALAKKVYYMFAPNINRVITSTLTVKNAESYGFEIKDNKPQGTMFMGESELKNDTNETQTIHSDSFTKTITDSITLAVTNGITTGVNISIGGKVFGMGVETSMSFEVSTSTTREQTSTESVAYTVPSQTVSVPAKKTYYVYTALQRNQLEGSIRLRADLSGPFSAIIQAGDGWIPIDLDDIYEFVKQYQSLHPLPSGISLNHNDKAIHFEGVAEYFYGTGTKFYVTITDTPSSQGTQEHKPIDAKTGLGTYEIQLDGKKLGFDLNDLKDQVEPEVFEKLLELQNEIV

SEQ ID NO: 340 - protein, 415 aa, Bacillus sp.
MKYKDRMRTRRNYKKTLLATAATLSLGMTVVGGTSFVSAEEKTPQQQHKTSYYAEYQHENDFSDHDKDQYKRFVDNWIKRTGSTFSTLGSISISPSEPDIALSNVLDNSQGAETMSLSTLEMTKKYADSVTTTHAIESLTEVSVEAAMEATAGVKTGVVDASVKQSVKAGLKQALKGTDTKANTHSEELSYTLKSMSIPVPAGKKYQIEVTVQKGNVSGTIDQIQEITGNESGKTDSNEIYFNANAVLFGPSGYKIHKESNTEDINSKYNLMDANSGVINMVYNYTGNDGNKHSVHEPITNANAYEFFNEVLKERYPAAKDGEEGNIAYIMSAYDNAYEVNADLLGKNIYLDNNTKKAYINNQSIPYNASIGYNYIVKVMDVTNGPSNSKPVKESSTTDKDKIQETANSLVSQLN

SEQ ID NO: 341 - protein, 377 aa, Artificial Sequence
  synthetic
MEEKTPQQQHKTSYYAEYQHENDFSDHDKDQYKRFVDNWIKRTGSTFSTLGSISISPSEPDIALSNVLDNSQGAETMSLSTLEMTKKYADSVTTTHAIESLTEVSVEAAMEATAGVKTGVVDASVKQSVKAGLKQALKGTDTKANTHSEELSYTLKSMSIPVPAGKKYQIEVTVQKGNVSGTIDQIQEITGNESGKTDSNEIYFNANAVLFGPSGYKIHKESNTEDINSKYNLMDANSGVINMVYNYTGNDGNKHSVHEPITNANAYEFFNEVLKERYPAAKDGEEGNIAYIMSAYDNAYEVNADLLGKNIYLDNNTKKAYINNQSIPYNASIGYNYIVKVMDVTNGPSNSKPVKESSTTDKDKIQETANSLVSQLN

SEQ ID NO: 342 - protein, 719 aa, Unknown
  Unknown organism from environmental sample
  misc_feature (716)..(718): Xaa can be any naturally occurring amino acid
MNSYQNTNEHEILDTSRNNSNMSNRYPRYPLAKDPQASMQNTNYKDWLKMCDSSTQFVDDISKYSSLEAYTSAKAAIGFGVSLVSIILSIFSGPISLAIGAIIGVTTAVLDFLPAGKDNGGFRQIWNYLIDHVKQLINDAIATDALNRAKSILDGLSNLISDYESKLDAWKRSNQSRDLNDEMIAKFISTNDIFLAQIPQLQQLGHQVSFLPLFAVAANFHLLLLRDASVYGKLWGMSPGFISDFYSGRQGQLNKTKEYTDYALRVYREGLEQSKKVSVSNSNNLNWENYNKYRRDMTLTVLDVIALFPTYDNRIYNISTKVELTRDVYTDLISYIKNPFLTNPVEGGRFEGYTSAEFNAIENALIRPPHLFTWLRELTGYFYQQYGLERFMNAIQNKYYYTFGNGIITGPIHGPRYSGDISVSVSLEDYQDIYSTLSTIFPLSTINHVNELQLGTARYFGVRGHTHNITDRRTGNKTQKILGEDIRSGRATGPSSVRSEIPYEGNVPPTAEKYSHRLSYISAYATDCGANSVREDRGCRRTPQLCAWTHTSVDPNNRIYPDKITQIPAVKAFDISNYATVYAGPGHTGGSVVGLTISYLLKIRLTPASTNKNYLVRVRYASMSGGTLRAERWSPSSVTNSDFSYSSTGSRDTFAYVNTLVTTFNQPSVEIIIQNIALGEIIVDRVEFIPVDSTALEYDGKQSLEKAQNVVNDLFXXXN

SEQ ID NO: 343 - protein, 429 aa, Brevibacillus sp.
LIHADTWNNRIKSISEAAAKKIPYVGAIVSFAIGQLWPTDKADIFSLIKDQVKGLVDQAILDKEMEERKHEIEGLNDTMNQYVDAGNHEKGGFMTSMLTQLNIMHHKLTESTNSIHLIPLTITIANIHLTLLRERLSHGKEIYTEDNTTVWQKDLTKRYQDYHKFFLEIYPKWKTWRESKIEIKWYTDKNPTTVPPFFYWAAHGYAKDTFAEKKVHYRHDFNSNETTFQGVCQAIKESWMNVAIAKIAACIATTFTLHRYLPGREDEPAIVDSNLETIWMGPYSLSILGNDSKVSYAVNVIDQPGELKQVYIREYNSIDGMQLIYTDRSGNFIGNSKGGEPHYLDATQDKYVIGMKMRFSSGIICRLEVLFSDGSSSGMLGNRKNWSGTDVDAVVESNYKLVCGAYKTGSGPSGTTGISVIKLGFKYSN

SEQ ID NO: 344 - protein, 429 aa, Artificial Sequence
  synthetic
MIHADTWNNRIKSISEAAAKKIPYVGAIVSFAIGQLWPTDKADIFSLIKDQVKGLVDQAILDKEMEERKHEIEGLNDTMNQYVDAGNHEKGGFMTSMLTQLNIMHHKLTESTNSIHLIPLTITIANIHLTLLRERLSHGKEIYTEDNTTVWQKDLTKRYQDYHKFFLEIYPKWKTWRESKIEIKWYTDKNPTTVPPFFYWAAHGYAKDTFAEKKVHYRHDFNSNETTFQGVCQAIKESWMNVAIAKIAACIATTFTLHRYLPGREDEPAIVDSNLETIWMGPYSLSILGNDSKVSYAVNVIDQPGELKQVYIREYNSIDGMQLIYTDRSGNFIGNSKGGEPHYLDATQDKYVIGMKMRFSSGIICRLEVLFSDGSSSGMLGNRKNWSGTDVDAVVESNYKLVCGAYKTGSGPSGTTGISVIKLGFKYSN

SEQ ID NO: 345 - protein, 516 aa, Bacillus sp.
MKYTNRSQAKRKYKQMLLATAATFTLGMSTVSTFGNVTSVYAAETSTKSFQWVGNTIKVLDTANGNTANIEALAGRLIGENYFKLVESGNLNFEDFMYTTRDLAISAVAMIPYGGTFIASLLNMAWPSSGQSQLDQMIDAIGPLIDQKISEYNLNTLKPKYKVLMDHVKSMEDFINDTPRNVQTNIQYSSSPGGYYVTQDTVRNKAEDLLVEFDQVLAAAKVSGQEEASLPIYTLIATAHLQFLKFMAENALHHPKIQYYNPNDVKGSEDAVGRLYADNLKRIAAEHMQYISKTSMSGEQKIINTMTKIKGAKQDDILNYVANMNSINVANQGGTNQGINALHGTTAAETYATLFTNRSKYVRDTKENMAFNVICGYANEVSGTIAIPLNTLTTDLGTSSINASGLTLTPGNTIRNDGAKGVVYTGVNGLKLNHNYTLSVTLKSVNSKGPNGSHPVVLDYAGKQKKEFDIGGGVQQTIELPFTTYYENVTGVNACVGINSKAGDPVLITKIEIKER

SEQ ID NO: 346 - protein, 475 aa, Artificial Sequence
  synthetic
MAETSTKSFQWVGNTIKVLDTANGNTANIEALAGRLIGENYFKLVESGNLNFEDFMYTTRDLAISAVAMIPYGGTFIASLLNMAWPSSGQSQLDQMIDAIGPLIDQKISEYNLNTLKPKYKVLMDHVKSMEDFINDTPRNVQTNIQYSSSPGGYYVTQDTVRNKAEDLLVEFDQVLAAAKVSGQEEASLPIYTLIATAHLQFLKFMAENALHHPKIQYYNPNDVKGSEDAVGRLYADNLKRIAAEHMQYISKTSMSGEQKIINTMTKIKGAKQDDILNYVANMNSINVANQGGTNQGINALHGTTAAETYATLFTNRSKYVRDTKENMAFNVICGYANEVSGTIAIPLNTLTTDLGTSSINASGLTLTPGNTIRNDGAKGVVYTGVNGLKLNHNYTLSVTLKSVNSKGPNGSHPVVLDYAGKQKKEFDIGGGVQQTIELPFTTYYENVTGVNACVGINSKAGDPVLITKIEIKER

SEQ ID NO: 347 - protein, 931 aa, Bacillus sp.
MQTIDSSKVGQATVIGLVGFYFKDSEFKDLMFIQVGEKSKLMDKSRINTASQQIHSVRWMGNLLPPQTGEYKLSTSFNNNVIMQINGETVINQSSIEKSLQLEKYKVYEIKVEFRNSTDTIVDLQLFWSIEDAPKVKIPEACILSPNFAEKANVLVENDEQPFFPNNNLFDRQQENGQKQSVSAPVDSDNDGIPDEWEEKGYTFKDNQIVAWNDSFSALGYRKYVSNPRNARTARDPYTDFEKVTGHMPAATKDEARDPLVAAYPAVGVGMEKLHFSKNDNVGEGIGGTKSKTVTKTDTTTNTVEGGGTIGWGEKGFSLSFSAKYSHAWSNSTSTADTDSTSWSSQIGINTAERAYLNANVRYYNAGSAPIYELRPTSNFVFQNSGDSITTITAGPNQIGNSLGPGTTYPQKGLAPISLDKANETGVVKISINAEQLDKLQEGTETLNLETTQNRGQYATLDATGTPVTDPSKQWDPIRTNIDAVSGSLTLNLGAGKESLERRVAAKNVNDPEDKTPEITIKEAIKKAFNAKEKDNRLYYTNQDGKDIFIHESAINLIADENTKKEIETQLSQMQDKKIYNVKWKRGMKITLHVPTAYHDFEPGHETWYYTYIEDGGYSGKKQGQINASGENSNGFTKLPQLKPNTNYTARAYMRTASATGSNDVVFYVDNNTGAGQGAKVSGRITGNQWKLVEFSFHTGENPEYFQGIGLENKGNSNLHFDDVSVTEWKPAEDIKKTHVLEQWDIVLYYGSHYLNGVTFKNVPNRTVRYQLRINGVDTVILPASPTDAQGKRYVRFTDFNANSGIPEESRIEVYAVDALSDHVKVKIAEYIPLSVGHIIDRWNIVTFNGAQYVNGVTLRKVSSRIVRYQLSIKGIYTVIRPGNPTDAQGNRYVNFLEFNAGQGIPITSRLQFFVVDEKVDSLKYRIGTQG

SEQ ID NO: 348 - protein, 403 aa, Bacillus sp.
MKSISKKVMAGLLVGATSLSIWAPISEAAAPENNRYYNIQLKSNPKKVWNVSQASNDNDRAILLWQGGSADHEKFAFFQLDGGAYAIVNKNSGKVVTFGDVSWAGGGPLPYRETLQQQSWTGEAKQKWNLRDLGSNGHGSNNYEIVNQANGKVPSYRWIGSTVDNAEFLQLDNSNPSDADKVFTLFNGTANIFGQNLTFFNETISVPKLPAIGTRPEAPVYTGGADQQLPQTSNSVVVGASLIPYFMVKDNQANDYTKIHNSPYYTLVKEEYWDKTFSAVIPAGLKRDYIFKSGMTSVDQQKMTDTLSMKIGADFGLKFGDASASLKTEISRTLQTEITSTDTEVSEETVASSLTSPSGKTTGFTEYQLATKYTLKRADGSLVSDPWIVKNNKIAIVRDKAQE

SEQ ID NO: 349 - protein, 374 aa, Artificial Sequence
  synthetic
MPENNRYYNIQLKSNPKKVWNVSQASNDNDRAILLWQGGSADHEKFAFFQLDGGAYAIVNKNSGKVVTFGDVSWAGGGPLPYRETLQQQSWTGEAKQKWNLRDLGSNGHGSNNYEIVNQANGKVPSYRWIGSTVDNAEFLQLDNSNPSDADKVFTLFNGTANIFGQNLTFFNETISVPKLPAIGTRPEAPVYTGGADQQLPQTSNSVVVGASLIPYFMVKDNQANDYTKIHNSPYYTLVKEEYWDKTFSAVIPAGLKRDYIFKSGMTSVDQQKMTDTLSMKIGADFGLKFGDASASLKTEISRTLQTEITSTDTEVSEETVASSLTSPSGKTTGFTEYQLATKYTLKRADGSLVSDPWIVKNNKIAIVRDKAQE

SEQ ID NO: 350 - protein, 976 aa, Bacillus sp.
MILNNVYKCLAVTALLTQTMVLPASSFAEQFQEKNGEKEHLFQEQVRTDVSTGLIGQYFTDNQFQQLSFIQVGEKNILINKDKVKEDITNVESIRWIGNIKPAETGEYKISTSKNESVIIQVDGDIIVKQNEETKPIRLEKDKIYEIKIEQRMEKGRAKGRAKELNLFWSKDHGKETLIPEEEIISPDFAQKTQVTQDEQLLLPNQNLFEANRQKRETSRKRVDTDKDGIPDFLEEKGYTFKDNAIVAWKDVYAERGYKKYISNPRKARTVADPYTDFEKVTGRMPAATKYDARDPLIAASPSIGVGVEKFHFSKNETVQEGASGTKSKTVTNSNTTTNSVDIGAKFGFNKDGFSFDFSPKYTRSWSSSTAIANAESESWSKQININLSERAFLNANIRYYNGGTASIYDLRPTSNFVLQHSGESIATVTANGNTIGNSLGPGATYPEKGKAPISLTQANEAGTVKISVNAENLDKIQDGREILNIETTQYRGQYGKITEDGRLVSGGEWGPIRTNIDAVSGVLTLNIGSSKESLERRIAAKDPRDPEDKTPEITVKEAIKKAFDVTEKDGRMIYTDEDGNDIVLEESAVNIITNENTKKEIEKQLANMQNKKIYDVKWKRGMEMTLYIPETYYDFENGKYHFSDIYTVKGGYTGNAHAMLEGNSSPGYAVIKNNLKPYTSYTARAYVKADTWTSTETTFFVGELDAIGNGGRGAKINGKVDGDDWQLVELSFNTGANPEYFGSIGLKNHGNTRLYFDDVSLTEWKRTENIEKSHAFKEWDTMYDDNAGKYKLQSVKFSKFPNQKVNYQILFNDDTWGPILPDSSVVDNSGERTISFGTRSNAPGAENKIGVFAVDEKNPNLKVKIAEFGMMTEQQIKKAHTLDSWILSEKGTYVDGLYFDNMDSNVLSHITGYKVSINDGLQSVKRRYGLDDKNKLKINILEYNLGKGIAKNIKLKIWAVVQNKDILVYEGLSGL

SEQ ID NO: 351 - protein, 974 aa, Artificial Sequence
  synthetic
MNNVYKCLAVTALLTQTMVLPASSFAEQFQEKNGEKEHLFQEQVRTDVSTGLIGQYFTDNQFQQLSFIQVGEKNILINKDKVKEDITNVESIRWIGNIKPAETGEYKISTSKNESVIIQVDGDIIVKQNEETKPIRLEKDKIYEIKIEQRMEKGRAKGRAKELNLFWSKDHGKETLIPEEEIISPDFAQKTQVTQDEQLLLPNQNLFEANRQKRETSRKRVDTDKDGIPDFLEEKGYTFKDNAIVAWKDVYAERGYKKYISNPRKARTVADPYTDFEKVTGRMPAATKYDARDPLIAASPSIGVGVEKFHFSKNETVQEGASGTKSKTVTNSNTTTNSVDIGAKFGFNKDGFSFDFSPKYTRSWSSSTAIANAESESWSKQININLSERAFLNANIRYYNGGTASIYDLRPTSNFVLQHSGESIATVTANGNTIGNSLGPGATYPEKGKAPISLTQANEAGTVKISVNAENLDKIQDGREILNIETTQYRGQYGKITEDGRLVSGGEWGPIRTNIDAVSGVLTLNIGSSKESLERRIAAKDPRDPEDKTPEITVKEAIKKAFDVTEKDGRMIYTDEDGNDIVLEESAVNIITNENTKKEIEKQLANMQNKKIYDVKWKRGMEMTLYIPETYYDFENGKYHFSDIYTVKGGYTGNAHAMLEGNSSPGYAVIKNNLKPYTSYTARAYVKADTWTSTETTFFVGELDAIGNGGRGAKINGKVDGDDWQLVELSFNTGANPEYFGSIGLKNHGNTRLYFDDVSLTEWKRTENIEKSHAFKEWDTMYDDNAGKYKLQSVKFSKFPNQKVNYQILFNDDTWGPILPDSSVVDNSGERTISFGTRSNAPGAENKIGVFAVDEKNPNLKVKIAEFGMMTEQQIKKAHTLDSWILSEKGTYVDGLYFDNMDSNVLSHITGYKVSINDGLQSVKRRYGLDDKNKLKINILEYNLGKGIAKNIKLKIWAVVQNKDILVYEGLSGL

SEQ ID NO: 352 - protein, 627 aa, Unknown
  Unknown organism from environmental sample
MGKTSGEVKVLRTRQYRNGCEMVYDQPLPFGGGVKIAGKIGLGVVKTVITSIIRRGRDNEIAGRILSDVYNILWSNHKGYWNEMLEAVETLIQHDISENIRNNVLAVLTDVRNALLQYQQAVDDWQRNRTDSKLQEQVRNQLIATNTFIEFAMPSFTVPHYEVILLPIFAQVANLHLLLWRDIEIFGLEWGMSKAEIDDYSFADSGLTRLAQKYTNHIVKWYREGLCIATNLDLGQCPEFYQLDKWNAMNDFRREMTFMVLDIIALWPTYDPIRYPLGIKTELTREVFTPLLGINPNSSSLIHTMEEIEDKLTFLSPFLSWISFEQLVKQGDGISTFTDWGNFTLSNTMLPISYILGGAGSGTGDSTNIPIKSENYDVYKVRVGTDYSHPSNVPIRKLEYYCTNGTMENVITVGTGTTNALFELPNNGYVDYSHRVSRLSCSNVEVYEWEGGPKYALKNIAYGWTHISVDSKNTLSANAITQIPARKGYSSSESNLSIAGPYFTGGDLISLPPNGAQLQMRVTPPVSSSTTNYCVRLRYASSGNTNIYVERVLSSGDTYGETHNVPATYSGGSLSYSSFAYVVNLTAIFEGFNVKIKIKNIGSSQIILDKIEFLPIKESLEGIKKLT

SEQ ID NO: 353 - protein, 376 aa, Unknown
  Unknown organism from environmental sample
MKRQKIHEINGILKGEKKMKRYKKLLMVAPLACMLGTGVVTLPTASHADAAPVASVAADPFRQGSTYSKENITQVLYNRVLSGIEASPELRQKFKMADDESVQREYGETILNGTKYPGTDYGLRDQLSKVTASSIGKNISVNPTTVTEVEAGKIELLTYRNETPLTQKQFTTEKSMKRIDTVTATNQYGFKLGFESNTQFSVDALVASATQSFKASAEFNFSHTDTNTVTNEETVVFKAQEVLAASGGTTNYFTRVGKAKFSGSFQTDAALTDLKLKLPIVKKNDDRTVVHTEEVTLTSQDIYTIFKNVPYIPLPAYLSFDDNGKKVLVKNVTFDYTGEMGYNTAAQAEFIPFNQEKPKQTMSYEKYEAKTQDKSL

SEQ ID NO: 354 - protein, 327 aa, Artificial Sequence
  synthetic
MAPVASVAADPFRQGSTYSKENITQVLYNRVLSGIEASPELRQKFKMADDESVQREYGETILNGTKYPGTDYGLRDQLSKVTASSIGKNISVNPTTVTEVEAGKIELLTYRNETPLTQKQFTTEKSMKRIDTVTATNQYGFKLGFESNTQFSVDALVASATQSFKASAEFNFSHTDTNTVTNEETVVFKAQEVLAASGGTTNYFTRVGKAKFSGSFQTDAALTDLKLKLPIVKKNDDRTVVHTEEVTLTSQDIYTIFKNVPYIPLPAYLSFDDNGKKVLVKNVTFDYTGEMGYNTAAQAEFIPFNQEKPKQTMSYEKYEAKTQDKSL

SEQ ID NO: 355 - protein, 330 aa, Bacillus sp.
MKLKVLSATGLALSIGLTSLGGITSTFAAETPKVEQSNEKLPSSRGFDANGNFTGWVSNDYNALQAGGVMSFTPYDISDLKVTSQKTKVKSIDFAQNDNTANSFPSTMNSMTKTFKHSDSMTIHAEAGFKIGAKVSAEASVPGLAKLTAEMSTETSFSGGVANVKGKEVTVGYGGEQMKADPFQLYRIDYLLEETEFDGEITTTREVTSIGNNMKFYTMTGDGSYYPGATEKYKNGVTGKQVYDFFKDLQSMANSYGVMIVKDGVGAASIRKGEFDKHYYFDDVNKKVYTQGKKAQFDGVTGNGLTAKPSVIGGKSRSNIDLTPKLIHKF

SEQ ID NO: 356 - protein, 303 aa, Artificial Sequence
  synthetic
MAETPKVEQSNEKLPSSRGFDANGNFTGWVSNDYNALQAGGVMSFTPYDISDLKVTSQKTKVKSIDFAQNDNTANSFPSTMNSMTKTFKHSDSMTIHAEAGFKIGAKVSAEASVPGLAKLTAEMSTETSFSGGVANVKGKEVTVGYGGEQMKADPFQLYRIDYLLEETEFDGEITTTREVTSIGNNMKFYTMTGDGSYYPGATEKYKNGVTGKQVYDFFKDLQSMANSYGVMIVKDGVGAASIRKGEFDKHYYFDDVNKKVYTQGKKAQFDGVTGNGLTAKPSVIGGKSRSNIDLTPKLIHKF

SEQ ID NO: 357 - protein, 295 aa, Unknown
  Unknown organism from environmental sample
LNMKKKTILCSIIASSILGGGTLVNTASAAEIPKENNNIVNYKDIRQQGAIIDIDQKIYNMIKAIPRDPFGFGAYRDDESEESFNVSGINIKETNATNITPLFLGKNTFNNDSDLEQTYNTSEFSQSITQETSTTTQLGFNASTTAGGKAGIPFVAEGEVSATLEFNYSHTGTDTSSTTNTITAPSQSVKVPAHKIYRAEVYFEKKKTSGQVEMYADILTHARQGRIRMTIGEALDITKNKYGLIKSPNDPDQVRAKGSGHFSIEYGTNLIVRTYDITSGQKSAKLIDTKTISLK

SEQ ID NO: 358 - protein, 267 aa, Artificial Sequence
  synthetic
MAEIPKENNNIVNYKDIRQQGAIIDIDQKIYNMIKAIPRDPFGFGAYRDDESEESFNVSGINIKETNATNITPLFLGKNTFNNDSDLEQTYNTSEFSQSITQETSTTTQLGFNASTTAGGKAGIPFVAEGEVSATLEFNYSHTGTDTSSTTNTITAPSQSVKVPAHKIYRAEVYFEKKKTSGQVEMYADILTHARQGRIRMTIGEALDITKNKYGLIKSPNDPDQVRAKGSGHFSIEYGTNLIVRTYDITSGQKSAKLIDTKTISLK

SEQ ID NO: 359 - protein, 362 aa, Unknown
  Unknown organism from environmental sample
MKKYKKLLMVAPLACMLGTGVVALPTASHADTAPVAQVNDIYQQGSTYSKENITNVLYMRLARGIEASPELRQKFKIADDESVQRENPATSFTDPNGNTTEYPAIDYGLKDQLSKVTVASTGTNITVNPTTVTEVEAGKIELLSYRNDTPLTQKQFTTEKQMKRVDTVTATNQYGFKLGFESTTEFKVDALVASATQSFKASAEFNFSHTDTNTVTNEETVIFKAQEVLAAAGGTTNYFTRVGKAKFSGSFQTDAALSELKLKLPIVKKNSNQTVVHTEEVTLTSQDIYTLFKNVPYIPLPAYLSFDDNGKKVLMKNVTFDYTGEMGYSTAAQAEFIPFDQNQPKQTMSYEKYETKTQDKSL

SEQ ID NO: 360 - protein, 333 aa, Artificial Sequence
  synthetic
MDTAPVAQVNDIYQQGSTYSKENITNVLYMRLARGIEASPELRQKFKIADDESVQRENPATSFTDPNGNTTEYPAIDYGLKDQLSKVTVASTGTNITVNPTTVTEVEAGKIELLSYRNDTPLTQKQFTTEKQMKRVDTVTATNQYGFKLGFESTTEFKVDALVASATQSFKASAEFNFSHTDTNTVTNEETVIFKAQEVLAAAGGTTNYFTRVGKAKFSGSFQTDAALSELKLKLPIVKKNSNQTVVHTEEVTLTSQDIYTLFKNVPYIPLPAYLSFDDNGKKVLMKNVTFDYTGEMGYSTAAQAEFIPFDQNQPKQTMSYEKYETKTQDKSL

SEQ ID NO: 361 - protein, 336 aa, Bacillus sp.
MKKSSKKKKQILSLAMIGAIGTTFALTSPTSASAAQVNPVQAMTQAQGNVSVSDWKDPFNQAFSTLQQNNASYYWFGENFYYKNETITGLRLYNVYQSSVEADGSPTITNSNSLFVGKTTLTNKTDQEQELTTSQFSKTFETSVTSSTTHGFNLGVTATSTFGIPLIGETSVQLSTEYNFSNTNENRKAESYTYTATPQTIKVPAHSAVEVIVNLNTAKIKGNVKLLSLVDGVYDSKKNDRQSVSSTSLASLAARALQYDKNLNLSVNGVESQDKVYVVGRGNYSAEYGTEFAVTVRPVAKPSTFAAKSRSMVAENSKATNEGYTYTVKPEVKKEQ

SEQ ID NO: 362 - protein, 303 aa, Artificial Sequence
  synthetic
MAQVNPVQAMTQAQGNVSVSDWKDPFNQAFSTLQQNNASYYWFGENFYYKNETITGLRLYNVYQSSVEADGSPTITNSNSLFVGKTTLTNKTDQEQELTTSQFSKTFETSVTSSTTHGFNLGVTATSTFGIPLIGETSVQLSTEYNFSNTNENRKAESYTYTATPQTIKVPAHSAVEVIVNLNTAKIKGNVKLLSLVDGVYDSKKNDRQSVSSTSLASLAARALQYDKNLNLSVNGVESQDKVYVVGRGNYSAEYGTEFAVTVRPVAKPSTFAAKSRSMVAENSKATNEGYTYTVKPEVKKEQ

SEQ ID NO: 363 - protein, 1057 aa, Bacillus sp.
MKNIYKCLTVTALLTQLAIFPAGSFAENENIPGDVSNKNAQSSVNGLMGQYFTDDALSQLAFIQVGENSELINKNKMQEAIKNIQSVRWIGQLKPSQTGEYFISTSNDQNVILQINGETIINQKNENKSIKLEKDKEYEIKIEYQNKDKKELQLFWGMNQSEKVKIPEKNIISPDFSRKVELPDNEKEQKLIPESNLFNKKGRTQQVTMVVDTDKDGIPDTLEENGYTFKDNQIVPWNESFAPLGYKKYVSNPRSARTVADPYTDFEKVTGHMPAATKDEAKDPLVAAYPAVGVGMEKFHFSPNENVSEGASGTKTKSVTDTSTTSHSVDIGGKIGFNKDGFSFDFSPKYTHSWSNSTSVQNTESETWSTQIGINPAERAFLNANIRYYNAGTAPIYDVKPTSNFVLQHSGSSIATITSGPNQIGNSLAPGDTYPKRGQAPISLNSANEAGTVKIPINGEQLDKIQSGDDVLDLETTQNKGQFATVDATGNPVTDPSKQWDPIRTNIDAVSGALTLNFGTGKDSLERRIAAKNPNNPEDKTPEITIKEAIKKAFGAKEKDGRMYVTDRNGKDVWIDESAVNLIGDANTQKEIENQLSKMSDKKVYNVKWKRGMKITLHVPTAYHDFEANSAGWYYTYKDNGGYTGQKRGRIGETGNGYTVANLTLKPYTSYTARAYVKTGTSTGNNDVTFYVDNSTGAGKGAKTSGKVTGDKWEMVEFSFNTGGNPEYFSKIGFQNKGNAQLHFDDVSITEWAQSENLQKGHRLETWQTAQNNRIDGVTFSKFPLAKLRYQLEIEGKFTEIRSDAITDTNGKRYLNFYKFNSNQGIDSNKKIAVYAVDEKNDHLKMKLQENEPQHHFKSWNVVTHSNKKYVNGVTFQKVPTEEVNYQLKVNGSWTAIKSGYAVQPDGSKYINFLEFNGGYGYAESTSIEVWAVSKSDSTKKTRVAHYNNKETLVASISSNPSPSPGQKNRSSQNFSIDNLPAGTKGLKWVVEPTTPDSASNIRFKIMRDVSGGTDPVVWSDLFNQKTTGIQTSSKFYVSNPQGASKNFTVKVYAISN

SEQ ID NO: 364 - protein, 1032 aa, Artificial Sequence
  synthetic
MENENIPGDVSNKNAQSSVNGLMGQYFTDDALSQLAFIQVGENSELINKNKMQEAIKNIQSVRWIGQLKPSQTGEYFISTSNDQNVILQINGETIINQKNENKSIKLEKDKEYEIKIEYQNKDKKELQLFWGMNQSEKVKIPEKNIISPDFSRKVELPDNEKEQKLIPESNLFNKKGRTQQVTMVVDTDKDGIPDTLEENGYTFKDNQIVPWNESFAPLGYKKYVSNPRSARTVADPYTDFEKVTGHMPAATKDEAKDPLVAAYPAVGVGMEKFHFSPNENVSEGASGTKTKSVTDTSTTSHSVDIGGKIGFNKDGFSFDFSPKYTHSWSNSTSVQNTESETWSTQIGINPAERAFLNANIRYYNAGTAPIYDVKPTSNFVLQHSGSSIATITSGPNQIGNSLAPGDTYPKRGQAPISLNSANEAGTVKIPINGEQLDKIQSGDDVLDLETTQNKGQFATVDATGNPVTDPSKQWDPIRTNIDAVSGALTLNFGTGKDSLERRIAAKNPNNPEDKTPEITIKEAIKKAFGAKEKDGRMYVTDRNGKDVWIDESAVNLIGDANTQKEIENQLSKMSDKKVYNVKWKRGMKITLHVPTAYHDFEANSAGWYYTYKDNGGYTGQKRGRIGETGNGYTVANLTLKPYTSYTARAYVKTGTSTGNNDVTFYVDNSTGAGKGAKTSGKVTGDKWEMVEFSFNTGGNPEYFSKIGFQNKGNAQLHFDDVSITEWAQSENLQKGHRLETWQTAQNNRIDGVTFSKFPLAKLRYQLEIEGKFTEIRSDAITDTNGKRYLNFYKFNSNQGIDSNKKIAVYAVDEKNDHLKMKLQENEPQHHFKSWNVVTHSNKKYVNGVTFQKVPTEEVNYQLKVNGSWTAIKSGYAVQPDGSKYINFLEFNGGYGYAESTSIEVWAVSKSDSTKKTRVAHYNNKETLVASISSNPSPSPGQKNRSSQNFSIDNLPAGTKGLKWVVEPTTPDSASNIRFKIMRDVSGGTDPVVWSDLFNQKTTGIQTSSKFYVSNPQGASKNFTVKVYAISN

SEQ ID NO: 365 - protein, 326 aa, Bacillus sp.
MKKKVITALALSIPVLISSGNMASAQVNTPSNLSTGNIDSQKLLHYQEQGKQVVNIETAIREAIPGYVKHIHGFGESASPRVIINDIKLMDVEEKYMDPEYPIQSKLISRGAEKLVQSIEEDIYNDHPSAELTKSHTFQHAVSNASTLTKSITHSHKGGVKFTYKAKVNLIGADSEVGGEVSYEYTNSNQEGTSDSKTFSKTFSSTASAKLKPMSRAKLVSNVYTSPAIYELKSRSFFTGSVQFSYVLSSNPNKVETKTVSLYELFTRTDYPTRDSIAEKYHMWSQTFWNPENGEAVQALLFEGTSLLNIDETYRTETRLKDIKSM

SEQ ID NO: 366 - protein, 302 aa, Artificial Sequence
  synthetic
MQVNTPSNLSTGNIDSQKLLHYQEQGKQVVNIETAIREAIPGYVKHIHGFGESASPRVIINDIKLMDVEEKYMDPEYPIQSKLISRGAEKLVQSIEEDIYNDHPSAELTKSHTFQHAVSNASTLTKSITHSHKGGVKFTYKAKVNLIGADSEVGGEVSYEYTNSNQEGTSDSKTFSKTFSSTASAKLKPMSRAKLVSNVYTSPAIYELKSRSFFTGSVQFSYVLSSNPNKVETKTVSLYELFTRTDYPTRDSIAEKYHMWSQTFWNPENGEAVQALLFEGTSLLNIDETYRTETRLKDIKSM

SEQ ID NO: 367 - protein, 296 aa, Unknown
  Unknown organism from environmental sample
MAIVDLDAYLLALVKKTHPIGSIFHRVNTSYLSIKNAESYGFKIENSKPQGTMFMGESELKNDTNETQTIHSDSFTKTITDSVTLSVTNGMTAGVSVTISGKIFGIGAESSMSFEVSTSTTNEQTSEESVAYTVPSQTVVVPAKKTYYVYTALQRSQLEGSIRLRADLSGELLVAFKFEGMEMYVNLGDMYEYIKTHQLSHPLPSGISLNHNNKSIHFEGVAQYLYGTGTKFNVTITDTPSSQGIQEHKPFDAKTGLGTYEIQLDGKKLGFDINDLKEQMEPEVFEKLKELQNEIV

SEQ ID NO: 368 - protein, 403 aa, Bacillus sp.
LKTNKWLRTIPAACLLSSAILVLPTSSFAATDMSSCSKNDYSQSCVEQTDPGVNNRTHAMYETINRLVEMDDLNEQTNWSGKSLYNFIRFNYLILPSQEQDVLNQLNSIPKDNVELKQVLKALNGYHNRTNTITDTNTLQISNVNVNKYIEDPKPDPNSDQYREINTKAINESYSQTLTKKTQSITESIQSSKQLTVTHSLNTGVKEGLKSSIGVSVPLIGEVKGELSFEYSVNYGYTNASATIDTITHTVTSPQEDISLAPRTGAVVTAKLSTPVYKTKLLGTSKIKGYYTDQVNSYPTWVQLGIYNKFKVISQHNPTVWNKLKELGFSLDDQTKEVTFNGVIDLTDRHAPGSTFESRTQIYELDANGNINYNKPVGKPQTKTGQVQKSNVSNSTSRLLLVK

SEQ ID NO: 369 - protein, 403 aa, Artificial Sequence
  synthetic
MKTNKWLRTIPAACLLSSAILVLPTSSFAATDMSSCSKNDYSQSCVEQTDPGVNNRTHAMYETINRLVEMDDLNEQTNWSGKSLYNFIRFNYLILPSQEQDVLNQLNSIPKDNVELKQVLKALNGYHNRTNTITDTNTLQISNVNVNKYIEDPKPDPNSDQYREINTKAINESYSQTLTKKTQSITESIQSSKQLTVTHSLNTGVKEGLKSSIGVSVPLIGEVKGELSFEYSVNYGYTNASATIDTITHTVTSPQEDISLAPRTGAVVTAKLSTPVYKTKLLGTSKIKGYYTDQVNSYPTWVQLGIYNKFKVISQHNPTVWNKLKELGFSLDDQTKEVTFNGVIDLTDRHAPGSTFESRTQIYELDANGNINYNKPVGKPQTKTGQVQKSNVSNSTSRLLLVK

SEQ ID NO: 370 - protein, 375 aa, Artificial Sequence
  synthetic
MATDMSSCSKNDYSQSCVEQTDPGVNNRTHAMYETINRLVEMDDLNEQTNWSGKSLYNFIRFNYLILPSQEQDVLNQLNSIPKDNVELKQVLKALNGYHNRTNTITDTNTLQISNVNVNKYIEDPKPDPNSDQYREINTKAINESYSQTLTKKTQSITESIQSSKQLTVTHSLNTGVKEGLKSSIGVSVPLIGEVKGELSFEYSVNYGYTNASATIDTITHTVTSPQEDISLAPRTGAVVTAKLSTPVYKTKLLGTSKIKGYYTDQVNSYPTWVQLGIYNKFKVISQHNPTVWNKLKELGFSLDDQTKEVTFNGVIDLTDRHAPGSTFESRTQIYELDANGNINYNKPVGKPQTKTGQVQKSNVSNSTSRLLLVK

SEQ ID NO: 371 - protein, 1270 aa, Unknown
  Unknown organism from environmental sample
MNNNEFEIMDNGAVSYQSRYPLAKKPGSEWQQMNYKDWVNMCTNEEAGDIFNDTAGAVRTGLIVGTGIAWALLGLIPVYGTPLSAVAGLFNVLIPYWWPEQPGVQPGSPQAQFTWNQLMTAVEDLTDKKILESKRSNAIARWQGLQILGHDFYVALCDWTKDPDNDRKKEVLRQEFNDLNDALKLSMPHFGAQGFELPMLSMYAQAANMHLLVLKEVVQNGLRWGFEQYQVDRFYFDSTTPQGQGLLQLQANYTNYCVEWYERGLQEQYNTGDWNKFNDFRRNMTIMVLDTVAVWPTYDPRRYPYPTQSQLTRTVYTNPVGIRVEIGPIDRMENNMVSPPRLFSWLRKWEITTRGKHPFLEVPCLSVKTFQNTLSSMQWSITQGDRPYPIERTLTLDIPNPYYQDDIWKVDTLGSAGVNFWIYGWDFYFTKSTVQNLPIYARDSYVHKFNGLPCRGKDSGICDPCNFENPCRNETPNTSIPCEDKMQYSHRLSDIGASPPDPIPPVDYMLWNFGYGWTHVSADAKNLIDGSKKIIQIPAVKGKALYGEASVVRGPGSTGGDLVSLRPGGELVVTVTLPPPEQPGDFKSYVLGIRFANDLTTRLKVSYSDGYGESRSVIGAFGATSNPGPDGRLRFQSFAYQDFDTMWITQKEGLNEFDFTFENLGAVNGDGISNFQIDKLEFIPIERSLAEYQASQDIEKARKAVNALFTSDAKNALKLNVTDYAVDQAANLVECVSEEFHAQEKMILLDQVKYGKRLSQARNLLNYGDFESSDWSGENGWRTSHHVYVASDNPTFKGRYLHIPGAMSPQFSNKTYPTYAYQKVDESKLKSYTRYLVRGFVGNSKDLELLVERYGKDVHVEMDVPNDMQYTLPINECGGSDRCKPASYQASPPHTCTCKDTAVAHTDCTCKDKENRTLTNRYTTEPTGSAVYLNGPDHKSCGCKNNDMYQDGTHSHKSCGCKDPHVFTYHIDTGYVDQEENLGLFFALKIASENGIANIDNLEIIEAQPLTGEALARVKKREQKWKQDMVQKRAQTEKAVQAAQGAIQTLFTNVQYNRLKFETLFPQIVHAEKLVQQIPYAYHPFLGEALPTVPGMNFEIIQQLLVVIENAHALYEQRNLVRNGTFSSGTGNWHVTEGVKVQLLQDTSVLVLSEWSHGASQQLHIDPDRGYVLRVTARKEGGGKGTVTMSDCAAYTETVTFTSCDYNTVGSQMMTSGTLSGFVTKTLEIFPDTDRIQIDIGETEGTFQVESVELLCMKQMENAGNFEDEM

SEQ ID NO: 372 - protein, 686 aa, Artificial Sequence
  synthetic
MNNNEFEIMDNGAVSYQSRYPLAKKPGSEWQQMNYKDWVNMCTNEEAGDIFNDTAGAVRTGLIVGTGIAWALLGLIPVYGTPLSAVAGLFNVLIPYWWPEQPGVQPGSPQAQFTWNQLMTAVEDLTDKKILESKRSNAIARWQGLQILGHDFYVALCDWTKDPDNDRKKEVLRQEFNDLNDALKLSMPHFGAQGFELPMLSMYAQAANMHLLVLKEVVQNGLRWGFEQYQVDRFYFDSTTPQGQGLLQLQANYTNYCVEWYERGLQEQYNTGDWNKFNDFRRNMTIMVLDTVAVWPTYDPRRYPYPTQSQLTRTVYTNPVGIRVEIGPIDRMENNMVSPPRLFSWLRKWEITTRGKHPFLEVPCLSVKTFQNTLSSMQWSITQGDRPYPIERTLTLDIPNPYYQDDIWKVDTLGSAGVNFWIYGWDFYFTKSTVQNLPIYARDSYVHKFNGLPCRGKDSGICDPCNFENPCRNETPNTSIPCEDKMQYSHRLSDIGASPPDPIPPVDYMLWNFGYGWTHVSADAKNLIDGSKKIIQIPAVKGKALYGEASVVRGPGSTGGDLVSLRPGGELVVTVTLPPPEQPGDFKSYVLGIRFANDLTTRLKVSYSDGYGESRSVIGAFGATSNPGPDGRLRFQSFAYQDFDTMWITQKEGLNEFDFTFENLGAVNGDGISNFQIDKLEFIPIE

SEQ ID NO: 373 - protein, 265 aa, Bacillus sp.
MNANVTDLIELFGRYANQWSQQHGGGNSKVSLTLPGFENLAYTSFTQPVKYDKPTISMPEDIAVASNIYTNTGNQPLNVTIGLMGTLTNWLQLKVNEGTSEAGKRFLNIKLPNHIPSFSNEQLVPLGGATHENSRIQSWEVNHPFTINPKFKVTATLMIKTKKVTQSFEIKRILSRYIAIHTSKAINGHLTSLHHVSRILKDYFSPHIQVDGNNVNVTDKGELQSLFGIEQYIHIQGRSLSNPNIKEAYNIYNPETSIKQNFKLN

SEQ ID NO: 374 - protein, 77 aa, Bacillus sp.
MGQVPHGFQYVPSNAPKIAYNLNCLSMVEESCRKTIQVENCGPIEVTFEQAINMILASIGLEKLGLAHVINAEGEKI

SEQ ID NO: 375 - protein, 295 aa, Bacillus sp.
LIADVAGKSTSNSAHLEQYPWQGETFQQWSFEEVDGYYKIVNQNSGLVADVTGRSTSNSTHLEQYQWQNEIFQQWSLEEVETIALPSVDTQELPDPPQYTSLDDNLPDSTDPVITAYTLMPCIMVDDNGWSAVSKINQGPYYMLTKTQYWKKIDSHTFAPSTQYTSKTTYGMSEEDEESMTQTTSISVTADAGFSFGPMSSSISETVTNELQVSQSTTTDKMTTQENDETITNNHDYEVAWSLYALVTEYELKRANGTSVTSPWTVINKNDERESYYPLDSPPVPTSQANLKIVK

SEQ ID NO: 376 - protein, 295 aa, Artificial Sequence
  synthetic
MIADVAGKSTSNSAHLEQYPWQGETFQQWSFEEVDGYYKIVNQNSGLVADVTGRSTSNSTHLEQYQWQNEIFQQWSLEEVETIALPSVDTQELPDPPQYTSLDDNLPDSTDPVITAYTLMPCIMVDDNGWSAVSKINQGPYYMLTKTQYWKKIDSHTFAPSTQYTSKTTYGMSEEDEESMTQTTSISVTADAGFSFGPMSSSISETVTNELQVSQSTTTDKMTTQENDETITNNHDYEVAWSLYALVTEYELKRANGTSVTSPWTVINKNDERESYYPLDSPPVPTSQANLKIVK

SEQ ID NO: 377 - protein, 403 aa, Bacillus sp.
LKTNKWLRTIPAACLLSSAILVLPTSSFAATDMSSCSKNDYSQSCVEQTDPGVNNRTHAMYETINRLVEMDDLNEQTNWSGNSWYNFIRFNYLILPSQEQDVLNQLNSIPKDNVELKQVLKALNGYHNRTNTITDTNTLQISNVNVNKYIEDPKPDPNSDQYREINTKAINESYSQTLTKKTQNITESIQSTKQLTVTHSLNTGAKEGLKSSIGVSVPLIGEVKGEVSFEYSLNYGYTNASAKINTITHTVTSPQEDISLAPRTGAVVTAKLSTPVYKTKLLGISKIKGYYTDQINSYPTWVQLGIYNKLKVISQHNPTIWNKLKELGFSLDDQTKEVIFNGVIDLTDRHAPGSTFESRTQIYELDANGNINYNKPVGKPQTTTGQVQKSNISNSTSRVLLVK

SEQ ID NO: 378 - protein, 403 aa, Artificial Sequence
  synthetic
MKTNKWLRTIPAACLLSSAILVLPTSSFAATDMSSCSKNDYSQSCVEQTDPGVNNRTHAMYETINRLVEMDDLNEQTNWSGNSWYNFIRFNYLILPSQEQDVLNQLNSIPKDNVELKQVLKALNGYHNRTNTITDTNTLQISNVNVNKYIEDPKPDPNSDQYREINTKAINESYSQTLTKKTQNITESIQSTKQLTVTHSLNTGAKEGLKSSIGVSVPLIGEVKGEVSFEYSLNYGYTNASAKINTITHTVTSPQEDISLAPRTGAVVTAKLSTPVYKTKLLGISKIKGYYTDQINSYPTWVQLGIYNKLKVISQHNPTIWNKLKELGFSLDDQTKEVIFNGVIDLTDRHAPGSTFESRTQIYELDANGNINYNKPVGKPQTTTGQVQKSNISNSTSRVLLVK

SEQ ID NO: 379 - protein, 375 aa, Artificial Sequence
  synthetic
MATDMSSCSKNDYSQSCVEQTDPGVNNRTHAMYETINRLVEMDDLNEQTNWSGNSWYNFIRFNYLILPSQEQDVLNQLNSIPKDNVELKQVLKALNGYHNRTNTITDTNTLQISNVNVNKYIEDPKPDPNSDQYREINTKAINESYSQTLTKKTQNITESIQSTKQLTVTHSLNTGAKEGLKSSIGVSVPLIGEVKGEVSFEYSLNYGYTNASAKINTITHTVTSPQEDISLAPRTGAVVTAKLSTPVYKTKLLGISKIKGYYTDQINSYPTWVQLGIYNKLKVISQHNPTIWNKLKELGFSLDDQTKEVIFNGVIDLTDRHAPGSTFESRTQIYELDANGNINYNKPVGKPQTTTGQVQKSNISNSTSRVLLVK

SEQ ID NO: 380 - protein, 402 aa, Bacillus sp.
LKTNKWLRTIPAACLLSSAILVLPTSSFAATDMSSCSKNDYPQSCVEKTDPGVNNRTHAMYETINRLVEIDDLNEQTNWSGDSYNFIRFNYLILPSQEQDVLNQLNSIPKDNVELKQVLKSLNGYHNRTNTITDTNTLQISNVNVNKYIEDPKPDPNSDQYREINTKAINESYSQTLTKKTQNITESIQSSKQLTVTHSLNTGAKEGLKSSIGVSVPLIGEVKGELSFEYSVNYGYTNASATIDTITHTVTSPQEDISLAPRTGAVVTAKLSTPVYKTKLLGTSKIKGYYTDQVNSYPTWVQLGIYNKFKVISQHNPTVWNKLKELGFSLDDQTKEVIFNGVIDLTDRHAPGSTFESRTQIYELDANGNINYNKPVGKSQTKEGQVQKSNISNHTSRLLLVK

SEQ ID NO: 381 - protein, 402 aa, Artificial Sequence
  synthetic
MKTNKWLRTIPAACLLSSAILVLPTSSFAATDMSSCSKNDYPQSCVEKTDPGVNNRTHAMYETINRLVEIDDLNEQTNWSGDSYNFIRFNYLILPSQEQDVLNQLNSIPKDNVELKQVLKSLNGYHNRTNTITDTNTLQISNVNVNKYIEDPKPDPNSDQYREINTKAINESYSQTLTKKTQNITESIQSSKQLTVTHSLNTGAKEGLKSSIGVSVPLIGEVKGELSFEYSVNYGYTNASATIDTITHTVTSPQEDISLAPRTGAVVTAKLSTPVYKTKLLGTSKIKGYYTDQVNSYPTWVQLGIYNKFKVISQHNPTVWNKLKELGFSLDDQTKEVIFNGVIDLTDRHAPGSTFESRTQIYELDANGNINYNKPVGKSQTKEGQVQKSNISNHTSRLLLVK

SEQ ID NO: 382 - protein, 374 aa, Artificial Sequence
  synthetic
MATDMSSCSKNDYPQSCVEKTDPGVNNRTHAMYETINRLVEIDDLNEQTNWSGDSYNFIRFNYLILPSQEQDVLNQLNSIPKDNVELKQVLKSLNGYHNRTNTITDTNTLQISNVNVNKYIEDPKPDPNSDQYREINTKAINESYSQTLTKKTQNITESIQSSKQLTVTHSLNTGAKEGLKSSIGVSVPLIGEVKGELSFEYSVNYGYTNASATIDTITHTVTSPQEDISLAPRTGAVVTAKLSTPVYKTKLLGTSKIKGYYTDQVNSYPTWVQLGIYNKFKVISQHNPTVWNKLKELGFSLDDQTKEVIFNGVIDLTDRHAPGSTFESRTQIYELDANGNINYNKPVGKSQTKEGQVQKSNISNHTSRLLLVK

SEQ ID NO: 383 - protein, 411 aa, Bacillus sp.
MNSGEEYILKTNKWLRTIPAACLLSSAILVLPTSSFAATDMSSCSKNDYSQSCVEQADPGVNNRTHAMYETINRLVEMDDLNEQTNWSGKSWYNFIRFNYLILPSQEQDVLNQLNSIPKDNVELKQVLKSLNGYHNRTNTITDTNTLQISNVNVNKYIEDPKPDPNSDQYREINTKAINESYSQTLTKKTQNITESIQSSKQLTVTHSLNTGAKEGLKSSIGVSVPLIGEVKGELSFEYSVNYGYTNASATIDTITHTVTSPQEDISLAPRTGAVVTAKLSTPVYKTKLLGTSKIKGYYTDQVNSYPTWVQLGIYNKFKVISQHNPTVWNKLKELGFSLDDQTKEVIFNGVIDLTDRHAPGSTFESRTQIYELDANGNINYNKPVGKPQAKTGKVQKSNISNSTSRLLLVK

SEQ ID NO: 384 - protein, 403 aa, Artificial Sequence
  synthetic
MKTNKWLRTIPAACLLSSAILVLPTSSFAATDMSSCSKNDYSQSCVEQADPGVNNRTHAMYETINRLVEMDDLNEQTNWSGKSWYNFIRFNYLILPSQEQDVLNQLNSIPKDNVELKQVLKSLNGYHNRTNTITDTNTLQISNVNVNKYIEDPKPDPNSDQYREINTKAINESYSQTLTKKTQNITESIQSSKQLTVTHSLNTGAKEGLKSSIGVSVPLIGEVKGELSFEYSVNYGYTNASATIDTITHTVTSPQEDISLAPRTGAVVTAKLSTPVYKTKLLGTSKIKGYYTDQVNSYPTWVQLGIYNKFKVISQHNPTVWNKLKELGFSLDDQTKEVIFNGVIDLTDRHAPGSTFESRTQIYELDANGNINYNKPVGKPQAKTGKVQKSNISNSTSRLLLVK

SEQ ID NO: 385 - protein, 375 aa, Artificial Sequence
  synthetic
MATDMSSCSKNDYSQSCVEQADPGVNNRTHAMYETINRLVEMDDLNEQTNWSGKSWYNFIRFNYLILPSQEQDVLNQLNSIPKDNVELKQVLKSLNGYHNRTNTITDTNTLQISNVNVNKYIEDPKPDPNSDQYREINTKAINESYSQTLTKKTQNITESIQSSKQLTVTHSLNTGAKEGLKSSIGVSVPLIGEVKGELSFEYSVNYGYTNASATIDTITHTVTSPQEDISLAPRTGAVVTAKLSTPVYKTKLLGTSKIKGYYTDQVNSYPTWVQLGIYNKFKVISQHNPTVWNKLKELGFSLDDQTKEVIFNGVIDLTDRHAPGSTFESRTQIYELDANGNINYNKPVGKPQAKTGKVQKSNISNSTSRLLLVK

SEQ ID NO: 386 - protein, 411 aa, Bacillus sp.
MNSGEEYILKTNKWLRTIPAACLLSSAILVLPTSSFAATDMSSCSKNDYSQSCVEQTDPGVNNRTHAMYETINRLVEMDDLNEQTNWSGKSWYNFIRFNYLILPSQEQDVLNQLNSIPKDNVELKQVLKALNGYHNRTNTITDTNTLQISNVNVNKYIEDPKPDPNSDQYREINTKAINESYSQTLTKKTQNITESIQSSKQLTVTHSLNTGAKEGLKSSIGVSVPLIGEVKGELSFEYSVNYGYTNASATIDTITHTVTSPQEDISLAPRTGAVVTAKLSTPVYKTKLLGTSKIKGYYTDQVNSYPTWVQLGIYNKFKVISQHNPTVWNKLEEIGFSLDDQTKEVIFNGVIDLTDRHAPGSTFESRTQIYELDANGNINYNKPVGKPQVKIGKVQKSNVSNSTSRLLLVK

SEQ ID NO: 387 - protein, 403 aa, Artificial Sequence
  synthetic
MKTNKWLRTIPAACLLSSAILVLPTSSFAATDMSSCSKNDYSQSCVEQTDPGVNNRTHAMYETINRLVEMDDLNEQTNWSGKSWYNFIRFNYLILPSQEQDVLNQLNSIPKDNVELKQVLKALNGYHNRTNTITDTNTLQISNVNVNKYIEDPKPDPNSDQYREINTKAINESYSQTLTKKTQNITESIQSSKQLTVTHSLNTGAKEGLKSSIGVSVPLIGEVKGELSFEYSVNYGYTNASATIDTITHTVTSPQEDISLAPRTGAVVTAKLSTPVYKTKLLGTSKIKGYYTDQVNSYPTWVQLGIYNKFKVISQHNPTVWNKLEEIGFSLDDQTKEVIFNGVIDLTDRHAPGSTFESRTQIYELDANGNINYNKPVGKPQVKIGKVQKSNVSNSTSRLLLVK

SEQ ID NO: 388 - protein, 375 aa, Artificial Sequence
  synthetic
MATDMSSCSKNDYSQSCVEQTDPGVNNRTHAMYETINRLVEMDDLNEQTNWSGKSWYNFIRFNYLILPSQEQDVLNQLNSIPKDNVELKQVLKALNGYHNRTNTITDTNTLQISNVNVNKYIEDPKPDPNSDQYREINTKAINESYSQTLTKKTQNITESIQSSKQLTVTHSLNTGAKEGLKSSIGVSVPLIGEVKGELSFEYSVNYGYTNASATIDTITHTVTSPQEDISLAPRTGAVVTAKLSTPVYKTKLLGTSKIKGYYTDQVNSYPTWVQLGIYNKFKVISQHNPTVWNKLEEIGFSLDDQTKEVIFNGVIDLTDRHAPGSTFESRTQIYELDANGNINYNKPVGKPQVKIGKVQKSNVSNSTSRLLLVK

SEQ ID NO: 389 - protein, 307 aa, Bacillus sp.
VLFLEKINIRSGLDMKKKTILCSILASTLLGSGTLVNTASAAEIPKENNNIVNYKDIRQQGAIIDIDQKIYNMLKAIPLDPFGFGAFRDDESEEKFNVSGINIKETNATNITPLFLGKNTFNNDSDLEQTYNTSEFSQSITQETSTTTQLGFNASTTAGGKAGIPFVAEGEVSATLEFNYSHTGTDTSSTTNTITAPSQSVKVPAHKIYRAEVYFEKKKTSGQVEMYADILTHANQGRDRMTIGVALDRTKNKYGLIKSPNDPDQVRAKGNGHFTIEYGTNLIVKTYDITSGQKSAKLIDTKTISLK

SEQ ID NO: 390 - protein, 293 aa, Artificial Sequence
  synthetic
MKKKTILCSILASTLLGSGTLVNTASAAEIPKENNNIVNYKDIRQQGAIIDIDQKIYNMLKAIPLDPFGFGAFRDDESEEKFNVSGINIKETNATNITPLFLGKNTFNNDSDLEQTYNTSEFSQSITQETSTTTQLGFNASTTAGGKAGIPFVAEGEVSATLEFNYSHTGTDTSSTTNTITAPSQSVKVPAHKIYRAEVYFEKKKTSGQVEMYADILTHANQGRDRMTIGVALDRTKNKYGLIKSPNDPDQVRAKGNGHFTIEYGTNLIVKTYDITSGQKSAKLIDTKTISLK

SEQ ID NO: 391 - protein, 267 aa, Artificial Sequence
  synthetic
MAEIPKENNNIVNYKDIRQQGAIIDIDQKIYNMLKAIPLDPFGFGAFRDDESEEKFNVSGINIKETNATNITPLFLGKNTFNNDSDLEQTYNTSEFSQSITQETSTTTQLGFNASTTAGGKAGIPFVAEGEVSATLEFNYSHTGTDTSSTTNTITAPSQSVKVPAHKIYRAEVYFEKKKTSGQVEMYADILTHANQGRDRMTIGVALDRTKNKYGLIKSPNDPDQVRAKGNGHFTIEYGTNLIVKTYDITSGQKSAKLIDTKTISLK

SEQ ID NO: 392 - protein, 403 aa, Unknown
  Unknown organism from environmental sample
LKTKKWLRTIPAACFLSSAILVLPTSSFAAIDMRNCTKQDYSQSCVEQTDPGVNNRTHAMYETINRLVEIDDLNEQTNWSGNSWYNFIRFNYLILPSQEQDVLTQLNTIPKDNVELKQVLKALNGYHNRTNTIMDTNTLQISNVNVNKYIEDPKPDPNSDQYREINTKAINESYSQTLTKKTQNITESIVSTKQLTVTHSLNTGAKQGLKSSLGVSVPLIGEVKGELSFEYSVNYGYTNSSATIDTITHTVTSPQEDISLAPRTGTVVTAKLSTPVYKTKLLGTSRLKGYYTDQVNTYPTWVQLGIYNKFKVISQHNPKIWNKLKELGFALDDQTKEVIFNGVIDLTDRHAPGSTFESRTQIYELDANGNINYNKPVGGPQTKVGQVQQSNISNHTSRLLLIN

SEQ ID NO: 393 - protein, 375 aa, Artificial Sequence
  synthetic
MAIDMRNCTKQDYSQSCVEQTDPGVNNRTHAMYETINRLVEIDDLNEQTNWSGNSWYNFIRFNYLILPSQEQDVLTQLNTIPKDNVELKQVLKALNGYHNRTNTIMDTNTLQISNVNVNKYIEDPKPDPNSDQYREINTKAINESYSQTLTKKTQNITESIVSTKQLTVTHSLNTGAKQGLKSSLGVSVPLIGEVKGELSFEYSVNYGYTNSSATIDTITHTVTSPQEDISLAPRTGTVVTAKLSTPVYKTKLLGTSRLKGYYTDQVNTYPTWVQLGIYNKFKVISQHNPKIWNKLKELGFALDDQTKEVIFNGVIDLTDRHAPGSTFESRTQIYELDANGNINYNKPVGGPQTKVGQVQQSNISNHTSRLLLIN

SEQ ID NO: 394 - protein, 377 aa, Bacillus sp.
MKKQKIREINGILKGEKKMKRYKKLLMVAPLACMLGTGVVTLPTVSHADAAPVASVANDPFGQGSTYSTENISQALYVRLIRGIEGSPELRQKFKLADDESVQRERGKDEGSFNGEKPSVIDYGLRDQLSKVTASSTGTNITVNPTTVTEVEAGKIELLSYRNDTPLTQKQYTTEKSMKRIDTVTATNQYGFKLGFESNTEFKVDALIASAKQSFKASAEFSFSHTDTNTVTNEETVTFKAQEVLAAAGGTTNYFTRVGKAKFSGSFQTDAALTNLKLKLPIVKDNNPNTVAHTEEVTLTSQDIYTIFKNSSIPLPPYLSFDDNGKKVLVKNVTFDYSGEMGYSTAAQAEFIPFNQEKPTQTMSYEKYEAKTQDKSL

SEQ ID NO: 395 - protein, 330 aa, Artificial Sequence
  synthetic
MDAAPVASVANDPFGQGSTYSTENISQALYVRLIRGIEGSPELRQKFKLADDESVQRERGKDEGSFNGEKPSVIDYGLRDQLSKVTASSTGTNITVNPTTVTEVEAGKIELLSYRNDTPLTQKQYTTEKSMKRIDTVTATNQYGFKLGFESNTEFKVDALIASAKQSFKASAEFSFSHTDTNTVTNEETVTFKAQEVLAAAGGTTNYFTRVGKAKFSGSFQTDAALTNLKLKLPIVKDNNPNTVAHTEEVTLTSQDIYTIFKNSSIPLPPYLSFDDNGKKVLVKNVTFDYSGEMGYSTAAQAEFIPFNQEKPTQTMSYEKYEAKTQDKSL

SEQ ID NO: 396 - protein, 438 aa, Bacillus sp.
MRRKYTSHFILLENIAYAHVLKMSFANFAFPSVPPLKTNKWLRTIPTACLLSSAILVLPTSSFAATDMSSCSKNDYSQSCVEQTDPGVNNRTHAMYETINRLVEMDDLNEQTNWSGNSWYNFIRFNYLILPSQEQDVLNQLNTIPKDNVELKQVLKALNGYHNRTNTITDTNTLQISNVNVNKYIEDPKPDPNSDQYREINTKAINESYSQTLTKKTQNITESILSTKQLTVTHSLNTGAKEGLKSSIGVSVPLIGEVKGELSFEYSVNYGYTNASATIDTITHTVTSPQEDISLAPRTGAVVTAKLSTPVYKTKLLGTSKIKGYYTDQVNSYPTWVQLGIYNKFKVISQHNPTVWNKLKELGFSLDDQTKEVIFNGVIDLTDRHAPGSTFESRTQIYELDANGNINYNTPVGKPQTKTGQVQKSNVSNSTSQLLLVK

SEQ ID NO: 397 - protein, 430 aa, Brevibacillus sp.
LIHADTWNNRIKSISEAAAKKIPYVGAIVSFAIGQLWPTDKADIFSLIKDQVKGLVDQAILEKEMEERKHEIEGLNDTMNQYVDAGNHEKGGFMTSMLTQLNIMHHKLTESTNSIHLIPLTITIANIHLTLLRERLSHGKEIYTEDNTTVWQKDLTKRYQDYHKFFLEIYPKWKTWRESKIEIKWYTDKNPTTVPPFFYWAAHGYAKDTFAEEKPIHYRDDFNSIETTFQGVCQAIKESWMNDAIAKIAASIATTFTLHRYLPGREDEPAIVDPNLETIWMGPYSLSIFGNDSKVSYAVNVTDQPGELKQVYIREYNSIDGMQLIYTDHSGNFVGNPKGGEPHYLPATQGKYVTGMKMRFSSGIICRMEVIFSDGSSSGMLGNRKNWSGTDVDAVVESNYKLVCGAYKTGSGPSGSTGISVIKLGFKYSN

SEQ ID NO: 398 - protein, 430 aa, Artificial Sequence
  synthetic
MIHADTWNNRIKSISEAAAKKIPYVGAIVSFAIGQLWPTDKADIFSLIKDQVKGLVDQAILEKEMEERKHEIEGLNDTMNQYVDAGNHEKGGFMTSMLTQLNIMHHKLTESTNSIHLIPLTITIANIHLTLLRERLSHGKEIYTEDNTTVWQKDLTKRYQDYHKFFLEIYPKWKTWRESKIEIKWYTDKNPTTVPPFFYWAAHGYAKDTFAEEKPIHYRDDFNSIETTFQGVCQAIKESWMNDAIAKIAASIATTFTLHRYLPGREDEPAIVDPNLETIWMGPYSLSIFGNDSKVSYAVNVTDQPGELKQVYIREYNSIDGMQLIYTDHSGNFVGNPKGGEPHYLPATQGKYVTGMKMRFSSGIICRMEVIFSDGSSSGMLGNRKNWSGTDVDAVVESNYKLVCGAYKTGSGPSGSTGISVIKLGFKYSN

SEQ ID NO: 399 - protein, 275 aa, Bacillus sp.
MAILDIWAEVDKFATNYCRVRGLTYSGKRGSVPQYPLIMTKFQSSLPDDRVLTPPEHVVTLPKTYDNITSQPQTTTLSFSEEITESSSTTTTEGVTIGTELSSTQTFKIKFVEVGLTQTVSSEYTTTSSKTLTTEHKRVVTSAEHITVQPYTRIKAVLVIENGIYDLITNITCDLNGMIYFDATNGTSFLTTIYEVLKGNNTPDFTFSFEDPEDPTCHFNGSGKIKGNSGLNSYVRVEEHPLEGHSGQYRQYILPGQDLTTDIITSENFGIPIFN

SEQ ID NO: 400 - protein, 326 aa, Bacillus sp.
MKRKILTAALVGMPLCIISGNIANAQINTSPGIIPEQSSLQKLSSYQIQGSQVVNIDQVVRKAIPGYARFVNGLGETSKVGVHINDVKFLDVEEKYIDPDYPIQSKLIGKGPEKLVQSIEEDIYNDHPSAELTKSHTFQHGISNTSTLTNSVTHNHKAGVKFTYKAKVNLLVKDAEVGGEVAYEYTNSNQSGTSDSKTFTKTFSSTASAKLLPNSKGKLVSSVYTTPATYEIKSRSFFTGSVQFSYVLANDPGTLKTTTVSLHELFSRTDEQAVDDIASNYHMWASTFWNPENGQPVNALLFEGKSILNIDETYRTETRLTDIKGI

SEQ ID NO: 401 - protein, 302 aa, Artificial Sequence
  synthetic
MQINTSPGIIPEQSSLQKLSSYQIQGSQVVNIDQVVRKAIPGYARFVNGLGETSKVGVHINDVKFLDVEEKYIDPDYPIQSKLIGKGPEKLVQSIEEDIYNDHPSAELTKSHTFQHGISNTSTLTNSVTHNHKAGVKFTYKAKVNLLVKDAEVGGEVAYEYTNSNQSGTSDSKTFTKTFSSTASAKLLPNSKGKLVSSVYTTPATYEIKSRSFFTGSVQFSYVLANDPGTLKTTTVSLHELFSRTDEQAVDDIASNYHMWASTFWNPENGQPVNALLFEGKSILNIDETYRTETRLTDIKGI

SEQ ID NO: 402 - protein, 429 aa, Brevibacillus sp.
LIHADTWNNRIRSISEAAAKKIPYVGAIVSFAIGQLWPTDKADIFSLIKDQVKGLVDQAILDKEMEERKHEIEGLNDTMNQYVDAGNHEKGGFMTSMLTQLNIMHHKLTESTNSIHLIPLTITIANIHLTLLRERLSHGKEIYIEDNTTVWQKDLTKRYQDYHKFFLEIYPKWKTWRESKIEIKWYTDKNPTTVPPFFYWAAHGYAKDTFVERKIHYRVDFNSIETTFQGVCEAIKESWMNDAIAKIAASIATTFTLHHYLPGREDEPAIVDPNLETIWMGPYSLSIFGNDSKVSYAVNVTDQPGELKQVYIREYNSIDGMQLIYTDHSGNFIGNPKGGEPHYLQATQDKYVAGMKMRFSSGIICSVEVIFSDGSSSGVLGNRKNWSGTDVDAVVESNYKLVCGAYKTGSGPSGTTGISVLKLGFKYSN

SEQ ID NO: 403 - protein, 429 aa, Artificial Sequence
  synthetic
MIHADTWNNRIRSISEAAAKKIPYVGAIVSFAIGQLWPTDKADIFSLIKDQVKGLVDQAILDKEMEERKHEIEGLNDTMNQYVDAGNHEKGGFMTSMLTQLNIMHHKLTESTNSIHLIPLTITIANIHLTLLRERLSHGKEIYIEDNTTVWQKDLTKRYQDYHKFFLEIYPKWKTWRESKIEIKWYTDKNPTTVPPFFYWAAHGYAKDTFVERKIHYRVDFNSIETTFQGVCEAIKESWMNDAIAKIAASIATTFTLHHYLPGREDEPAIVDPNLETIWMGPYSLSIFGNDSKVSYAVNVTDQPGELKQVYIREYNSIDGMQLIYTDHSGNFIGNPKGGEPHYLQATQDKYVAGMKMRFSSGIICSVEVIFSDGSSSGVLGNRKNWSGTDVDAVVESNYKLVCGAYKTGSGPSGTTGISVLKLGFKYSN

SEQ ID NO: 404 - protein, 403 aa, Bacillus sp.
LKTNKWLRTIPAACLLSAAILVLPTSSFAATDMSSCSKNDYSQSCVEQTDPGVNNRTHAMYETINRLVEMDDLNEQTNWSGKSWYNFIRFNYLILPSQEQDVLNQLNSIPKDNVELKQVLKALNGYHNRTNTITDTNTLQISNVNVNKYIEDPKPDPNSDQYREINTKAINESYSQTLTKKTQNITESILSTKQLTVTHSLNTGAKEGLKSSIGVSVPIIGEVKGELSFEYSLNYGYTNASATIDTITHTVTSPQEDISLSPRTGAVVTAKLSTPVYKTKLLGTSRIKGYYTDQVNSYPTWVQLGIYNKFKVIHQHNPTIWNKLKELGFSLDDQTKEVIFNGVIDLTDRHAPGSTFESRTQIYELDANGNINYNKPVGKPQTKKGQVQKSNIPNNTSRLLLVK

SEQ ID NO: 405 - protein, 403 aa, Artificial Sequence
  synthetic
MKTNKWLRTIPAACLLSAAILVLPTSSFAATDMSSCSKNDYSQSCVEQTDPGVNNRTHAMYETINRLVEMDDLNEQTNWSGKSWYNFIRFNYLILPSQEQDVLNQLNSIPKDNVELKQVLKALNGYHNRTNTITDTNTLQISNVNVNKYIEDPKPDPNSDQYREINTKAINESYSQTLTKKTQNITESILSTKQLTVTHSLNTGAKEGLKSSIGVSVPIIGEVKGELSFEYSLNYGYTNASATIDTITHTVTSPQEDISLSPRTGAVVTAKLSTPVYKTKLLGTSRIKGYYTDQVNSYPTWVQLGIYNKFKVIHQHNPTIWNKLKELGFSLDDQTKEVIFNGVIDLTDRHAPGSTFESRTQIYELDANGNINYNKPVGKPQTKKGQVQKSNIPNNTSRLLLVK

SEQ ID NO: 406 - protein, 375 aa, Artificial Sequence
  synthetic
MATDMSSCSKNDYSQSCVEQTDPGVNNRTHAMYETINRLVEMDDLNEQTNWSGKSWYNFIRFNYLILPSQEQDVLNQLNSIPKDNVELKQVLKALNGYHNRTNTITDTNTLQISNVNVNKYIEDPKPDPNSDQYREINTKAINESYSQTLTKKTQNITESILSTKQLTVTHSLNTGAKEGLKSSIGVSVPIIGEVKGELSFEYSLNYGYTNASATIDTITHTVTSPQEDISLSPRTGAVVTAKLSTPVYKTKLLGTSRIKGYYTDQVNSYPTWVQLGIYNKFKVIHQHNPTIWNKLKELGFSLDDQTKEVIFNGVIDLTDRHAPGSTFESRTQIYELDANGNINYNKPVGKPQTKKGQVQKSNIPNNTSRLLLVK

SEQ ID NO: 407 - protein, 326 aa, Bacillus sp.
MKRKILTAALVGMPLCIISGNTANAQINTSQGIIPEQSSLQKLSGYQTQGYQVVNIDQVVRKAIPGYARFVNGLGETSKVGVHINDVKFLDVEEKYIDPDYPIQSKLIGKGPEKLVQSIEEYIYNDHPSAELTKSHTFQHGISNTSTITNSVTHNHKAGVKFTYKAKVSFLVKDDEFGGEIAYEYTNSNQTGTSDSKTFTKTFSSTASAKLPPNSKGKLVSSVYTTPATYEIKSRSFFTGSVQFSYVLANDPGTLRTTTVSLHELFSRTDEQTVDDIANNYHMWASTFWNPENGQPVNALLFEGKSILNIDETYRTETRLTDIKGI

SEQ ID NO: 408 - protein, 302 aa, Artificial Sequence
  synthetic
MQINTSQGIIPEQSSLQKLSGYQTQGYQVVNIDQVVRKAIPGYARFVNGLGETSKVGVHINDVKFLDVEEKYIDPDYPIQSKLIGKGPEKLVQSIEEYIYNDHPSAELTKSHTFQHGISNTSTITNSVTHNHKAGVKFTYKAKVSFLVKDDEFGGEIAYEYTNSNQTGTSDSKTFTKTFSSTASAKLPPNSKGKLVSSVYTTPATYEIKSRSFFTGSVQFSYVLANDPGTLRTTTVSLHELFSRTDEQTVDDIANNYHMWASTFWNPENGQPVNALLFEGKSILNIDETYRTETRLTDIKGI

SEQ ID NO: 409 - protein, 330 aa, Chryseobacterium sp.
MIKKINSVCILLLMFSVSCSRDEVSAMNDDSEKVHYSEVKKSQLTEEEMLQQGWKIADEFKLPGNNSLGDSYSSPNEEREIPFKANHLKDMGYDVSYSGERTRLKNIFAYSGQVPDGIIFNPDLSVDGDARNTAPNPNVSIVLGTPQVTIKTDGADLPDNAYTTEAINNGDRESEITVTYSYKKGYSTSWKRTVSGSFEVAASVSVDIPLVAKASASTKVVVGGDTTEGTENSEEVTETSSYKTIVPAHSKKTISVLTKLKGSSVEYFVPMKLKGRLQANFPSPVDGHYYWAFPIESFPDFLTNIHGESGIVKSVSNVSVTVLESPAQKI

SEQ ID NO: 410 - protein, 304 aa, Artificial Sequence
  synthetic
MNDDSEKVHYSEVKKSQLTEEEMLQQGWKIADEFKLPGNNSLGDSYSSPNEEREIPFKANHLKDMGYDVSYSGERTRLKNIFAYSGQVPDGIIFNPDLSVDGDARNTAPNPNVSIVLGTPQVTIKTDGADLPDNAYTTEAINNGDRESEITVTYSYKKGYSTSWKRTVSGSFEVAASVSVDIPLVAKASASTKVVVGGDTTEGTENSEEVTETSSYKTIVPAHSKKTISVLTKLKGSSVEYFVPMKLKGRLQANFPSPVDGHYYWAFPIESFPDFLTNIHGESGIVKSVSNVSVTVLESPAQKI

SEQ ID NO: 411 - protein, 304 aa, Bacillus sp.; identical to SEQ ID NO: 410

SEQ ID NO: 412 - protein, 302 aa, Artificial Sequence
  synthetic
MQINTSPGIIPEQSSLQKLSSYQTQGSQVVNIDQVVRKAIPGYARFVNGLGETSKVGVHINDVKFLDVEEKYIDPDYPIQSKLIGKGPEKLVQSIEEYIYNEHPSAELTKSHTFQHGISNTSTLTNSVTHNHKAGVKFTYKAKVNLLVKDAEVGGEVAYEYTNSNQTGTSDSKTFTKTFSSTASAKLPPNSKGKLVSSVYTTPATYEIKSRSFFTGSVQFSYVLANDPGTLRTTTVSLHELFSRTDEQTVDDIANNYHMWASTFWNPENGQPVNALLFEGKSILNIDETYRTETRLTDIKGI

SEQ ID NO: 413 - protein, 434 aa, Bacillus sp.
LVLSFYIAKVILFRDKSISNVQYNFIFCNLVGILPTKLGGNIMKSISKKVMAGLGVGAMSLSIWAPSSQAAAPMNNEYHTIHLAANSNIVWDVYKGWDSDNAGIILYNGDRGDNEQFVFFPLDGGAYAIVNKSTGKPVGLGNAYIWSDGVRDAMSFNNQGLRQTNWTGAASEQWYLRDKGNNNYEIVNQGTGKVASWAWNGISGAHSREYVDLDESNPYDNNRLFNIPAARSTFSLPTLPAVGTRPNAPDYNTSGAIDQQLPQTSNSVVVGASLIPSIMVKDNGASDYTKIHNSPYYVLVKEEYWEKVRSEIIPAGATSKYTVKSGVSEIDQKKMSDTLAMSFGSDLGLKFGESSLSIKSSVSRTIQTEVTKTSTNATEETEEKSIPSIPGQNTGFTAYQLVTKYTLKRTDGSVVTDPSIVRDSKQTIARTIAK

SEQ ID NO: 414 - protein, 392 aa, Artificial Sequence
  synthetic
MKSISKKVMAGLGVGAMSLSIWAPSSQAAAPMNNEYHTIHLAANSNIVWDVYKGWDSDNAGIILYNGDRGDNEQFVFFPLDGGAYAIVNKSTGKPVGLGNAYIWSDGVRDAMSFNNQGLRQTNWTGAASEQWYLRDKGNNNYEIVNQGTGKVASWAWNGISGAHSREYVDLDESNPYDNNRLFNIPAARSTFSLPTLPAVGTRPNAPDYNTSGAIDQQLPQTSNSVVVGASLIPSIMVKDNGASDYTKIHNSPYYVLVKEEYWEKVRSEIIPAGATSKYTVKSGVSEIDQKKMSDTLAMSFGSDLGLKFGESSLSIKSSVSRTIQTEVTKTSTNATEETEEKSIPSIPGQNTGFTAYQLVTKYTLKRTDGSVVTDPSIVRDSKQTIARTIAK

SEQ ID NO: 415 - protein, 361 aa, Artificial Sequence
  synthetic
MNNEYHTIHLAANSNIVWDVYKGWDSDNAGIILYNGDRGDNEQFVFFPLDGGAYAIVNKSTGKPVGLGNAYIWSDGVRDAMSFNNQGLRQTNWTGAASEQWYLRDKGNNNYEIVNQGTGKVASWAWNGISGAHSREYVDLDESNPYDNNRLFNIPAARSTFSLPTLPAVGTRPNAPDYNTSGAIDQQLPQTSNSVVVGASLIPSIMVKDNGASDYTKIHNSPYYVLVKEEYWEKVRSEIIPAGATSKYTVKSGVSEIDQKKMSDTLAMSFGSDLGLKFGESSLSIKSSVSRTIQTEVTKTSTNATEETEEKSIPSIPGQNTGFTAYQLVTKYTLKRTDGSVVTDPSIVRDSKQTIARTIAK

SEQ ID NO: 416 - protein, 327 aa, Bacillus sp.
MKKKTITALALSIPVFISSGNIASAQINPPANMSIGNTNSKKLSNYQEQRKQVVNIETAIREAIPGYVKYIHGFGESVNPGVIINDIKLIDVEEKYRDPEYPLQTKLVNRGPEKLVQSIEEDIYNDHPSAELTKSHTFQHTISNTSTLTKSITHSHKGGAKFTYKATIEVALGPKTEVGGEVSYEYTNSNQEGTSDSKTFSKTFSSTASAKLQPMSSAKLVSNVYTSPATYELKSRSFFTGSVQFSYILASNPNKLETKTVSLYELFTRTDYQTRDNIAEKYHMWSQTFWKPENGEAVQALLFEGTSILNIDETYRTETRLKDIKSM

SEQ ID NO: 417 - protein, 303 aa, Artificial Sequence
  synthetic
MQINPPANMSIGNTNSKKLSNYQEQRKQVVNIETAIREAIPGYVKYIHGFGESVNPGVIINDIKLIDVEEKYRDPEYPLQTKLVNRGPEKLVQSIEEDIYNDHPSAELTKSHTFQHTISNTSTLTKSITHSHKGGAKFTYKATIEVALGPKTEVGGEVSYEYTNSNQEGTSDSKTFSKTFSSTASAKLQPMSSAKLVSNVYTSPATYELKSRSFFTGSVQFSYILASNPNKLETKTVSLYELFTRTDYQTRDNIAEKYHMWSQTFWKPENGEAVQALLFEGTSILNIDETYRTETRLKDIKSM

SEQ ID NO: 418 - protein, 324 aa, Paenibacillus sp.
LQGIGDDLMNAKIKLLTAMMILTVSFLMPTANTASANTDAVNVNNQIRSSNYQAVQVVNIAESARKVIPNYVRWVHNGLHPSVRVDVLDVKLINVEEQGVVPDFKVELDLVQRGPEKLIQTLQHDAFNPSSDKELTVSHNFTHTVSNASTLTKSITHSHKAGAKATFKVKTSFFGNEAEVGGELSYEYTNSNQSGTSDAKTVTFSTNSSASAKLPPMSKGTLISHVYASPAVYKIKSQSYFTGDVQFSYILSNDAPGAVRTLTVPLHDLFFRGDESNEVAFQDNLWAGAVWDVTGRPTKVLIFEGLSFLTLDEQYRTETYLKDI

SEQ ID NO: 419 - protein, 316 aa, Artificial Sequence
  synthetic
MNAKIKLLTAMMILTVSFLMPTANTASANTDAVNVNNQIRSSNYQAVQVVNIAESARKVIPNYVRWVHNGLHPSVRVDVLDVKLINVEEQGVVPDFKVELDLVQRGPEKLIQTLQHDAFNPSSDKELTVSHNFTHTVSNASTLTKSITHSHKAGAKATFKVKTSFFGNEAEVGGELSYEYTNSNQSGTSDAKTVTFSTNSSASAKLPPMSKGTLISHVYASPAVYKIKSQSYFTGDVQFSYILSNDAPGAVRTLTVPLHDLFFRGDESNEVAFQDNLWAGAVWDVTGRPTKVLIFEGLSFLTLDEQYRTETYLKDI

SEQ ID NO: 420 - protein, 289 aa, Artificial Sequence
  synthetic
MNTDAVNVNNQIRSSNYQAVQVVNIAESARKVIPNYVRWVHNGLHPSVRVDVLDVKLINVEEQGVVPDFKVELDLVQRGPEKLIQTLQHDAFNPSSDKELTVSHNFTHTVSNASTLTKSITHSHKAGAKATFKVKTSFFGNEAEVGGELSYEYTNSNQSGTSDAKTVTFSTNSSASAKLPPMSKGTLISHVYASPAVYKIKSQSYFTGDVQFSYILSNDAPGAVRTLTVPLHDLFFRGDESNEVAFQDNLWAGAVWDVTGRPTKVLIFEGLSFLTLDEQYRTETYLKDI

SEQ ID NO: 421 - protein, 1270 aa, Unknown
  Unknown organism from environmental sample
MIGGQFMNQYYRNNEMEVLDLEVGRPRYPYAQNPGTELQSMDYKEWLLMCERNDSLRPGTLAETKDIITTSIDIVGAILGLIPIVGGPISAGVSILNSIIKLLWPEPTPEEPDPNKIWIQFKDKVEQLINQAINQEVWNAAIGKLNGLKRSLDLYQNAFSTWTKDQTDPELQEDLRMNFTSARHEMVTTIEQFRYTGQEVNLLTVFAQAADLHLLLLREGIMYGEQWGFDARTVQDFYSNAYGEGLRDLLPEYTDYCNKWYNQGLTIAYNLTPDLSNTERYPWAANRAPGNIEVLTQLEGWNLFNDWRRDVTIMALDLVAIWPTYDIKIYDNSAYGVQTELTRPVYSQATGTCWGSVLSRDQYEQGIVRPPHLATWLNFISFHLNPGPYDAPNSYKHYRGIQMEYYLSGPDYTTYISPLIGSTSTSGKKILVESKYDNDIFQVDSKHNDAVYTMDFLRNNGDIQTVGYRRDPNYSTLSWPPETNVSNYGHRMTWISGPVSSSTIPAFSMEWVHNSSSPFNNFATSTAENPIITQISAVKADVLAGDAYVTKGNGTTGGDLITLPANAKMTIRLTGTSYTPYQVRLRYTCPSGGDLLLSRYYNINGTWYNDAYFSMVLPATPSSGELTYNSFGYVMAPYNLGPTPSTDWEMQFANVGVSPITIDKIEFIPIMGNAAEYEAKQNLKKARKAVSVLFTDDKKNALRPDVTDYDVDQAANQVDCISDDMFPKEKMVLLDKVKQAKRLSQARNLLYYGDFKSSDWSSENGWTVSNNVSIQADPSVSRGRYLNMPGARVIDFSNTLYPTYAYQKIDESKLKPYTRYWIRGFVESSKELELLVTRYGKDIHTKMNVPSLPGIRMPDHCGANQVSLPISSDPCENIYATSAYTINESISNNRLCEDKHHFVFHIDVGELDMRANPGIQFGLKISSPEGMAQLDNLEVIEGYPLTGEALSRVKKREQKWKRERELQCMETEKAVTSATQAVDSLFTDTKKDRLKKTTNMQNIENAAAKVNAIPFVHNLEFEDLPGMNSLISQQLQSYIMHALNLYGRRNVIRNGDFSGGLSNWLVTDGVDVVERDGKSSVLVISQWDASVSQDVCVQPEHGYVLRVTARKEGAGKGYVTISDCTAENTETVTFTSDEMVMTNRPPVTSQTSSICDITDNYGTGSSPYNNNTVENSYVESLDTTPCSCGRYGREVCSCGSNYMRNSSSERNIEPSYTSTQRIPNRNTSLSSAYVTKTIEMFPETNHVRIEIGETQGTFLIESIEFICMED

SEQ ID NO: 422 - protein, 664 aa, Artificial Sequence
  synthetic
MNQYYRNNEMEVLDLEVGRPRYPYAQNPGTELQSMDYKEWLLMCERNDSLRPGTLAETKDIITTSIDIVGAILGLIPIVGGPISAGVSILNSIIKLLWPEPTPEEPDPNKIWIQFKDKVEQLINQAINQEVWNAAIGKLNGLKRSLDLYQNAFSTWTKDQTDPELQEDLRMNFTSARHEMVTTIEQFRYTGQEVNLLTVFAQAADLHLLLLREGIMYGEQWGFDARTVQDFYSNAYGEGLRDLLPEYTDYCNKWYNQGLTIAYNLTPDLSNTERYPWAANRAPGNIEVLTQLEGWNLFNDWRRDVTIMALDLVAIWPTYDIKIYDNSAYGVQTELTRPVYSQATGTCWGSVLSRDQYEQGIVRPPHLATWLNFISFHLNPGPYDAPNSYKHYRGIQMEYYLSGPDYTTYISPLIGSTSTSGKKILVESKYDNDIFQVDSKHNDAVYTMDFLRNNGDIQTVGYRRDPNYSTLSWPPETNVSNYGHRMTWISGPVSSSTIPAFSMEWVHNSSSPFNNFATSTAENPIITQISAVKADVLAGDAYVTKGNGTTGGDLITLPANAKMTIRLTGTSYTPYQVRLRYTCPSGGDLLLSRYYNINGTWYNDAYFSMVLPATPSSGELTYNSFGYVMAPYNLGPTPSTDWEMQFANVGVSPITIDKIEFIPI

SEQ ID NO: 423 - protein, 326 aa, Bacillus sp.
MKRKILTAALVGIPLCIISGNTANAQINTSTGIIPEQSSLQKLSSYQTQESQVVNIDQVVRKAIPGYARFINGLGETSKVGVHINDVKFLDVEEKYIDPDYPIQSKLIGKGPEKLVQSIEEYIYNEHPSAELTKSHTFQHGISNTSTITNSVTHNHKAGVKFTYKAKVNLLVKDAEVGGEVAYEYTNSNQNGTSDSKTFTKTFSSTASAKLPPNSKGKLVSSVYNTPATYEIKSRSFFTGSVQFSYVLANDPGTLRTTTVSLHELFSRTDEQTVDDIADNYHMWASAFWNPENGQLVNALLFEGKSILNIDETYRTETRLTDIKGI

SEQ ID NO: 424 - protein, 302 aa, Artificial Sequence
  synthetic
MQINTSTGIIPEQSSLQKLSSYQTQESQVVNIDQVVRKAIPGYARFINGLGETSKVGVHINDVKFLDVEEKYIDPDYPIQSKLIGKGPEKLVQSIEEYIYNEHPSAELTKSHTFQHGISNTSTITNSVTHNHKAGVKFTYKAKVNLLVKDAEVGGEVAYEYTNSNQNGTSDSKTFTKTFSSTASAKLPPNSKGKLVSSVYNTPATYEIKSRSFFTGSVQFSYVLANDPGTLRTTTVSLHELFSRTDEQTVDDIADNYHMWASAFWNPENGQLVNALLFEGKSILNIDETYRTETRLTDIKGI

SEQ ID NO: 425 - protein, 410 aa, Bacillus sp.
MNSGEEYILKTNKWLRTIPAACLLSSAILVLPTSSFAAINMNSCEKQGYSQNCVEQTDPGINNRTHAMYETINRLVEIDDLNEQTNWSGDSYNFIRFNYLILPSQEQDVLNQLNSIPKDNVELKQVLKSLNGYHNRTNTITDTNTLQISNVNVNKYIEDPKPDPNSDQYREINTKAINESYSQTLTKKTQNITESIQSSKQLTVTHSLNTGAKEGLKSSIGVSVPLIGEVKGELSFEYSVNYGYTNASATIDTITHTVTSPQEDISLAPRTGAVVTAKLSTPVYKTKLLGTSKIKGYYTDQVNSYPTWVQLGIYNKFKVISQHNPTVWNKLKELGFSLDDQTKEVIFNGVIDLTDRHAPGSTFESRTQIYKLDANGNINYNKPVGKSQAKTGKVQKSNVSNSTSRLLLVK

SEQ ID NO: 426 - protein, 370 aa, Artificial Sequence
  synthetic
MNSCEKQGYSQNCVEQTDPGINNRTHAMYETINRLVEIDDLNEQTNWSGDSYNFIRFNYLILPSQEQDVLNQLNSIPKDNVELKQVLKSLNGYHNRTNTITDTNTLQISNVNVNKYIEDPKPDPNSDQYREINTKAINESYSQTLTKKTQNITESIQSSKQLTVTHSLNTGAKEGLKSSIGVSVPLIGEVKGELSFEYSVNYGYTNASATIDTITHTVTSPQEDISLAPRTGAVVTAKLSTPVYKTKLLGTSKIKGYYTDQVNSYPTWVQLGIYNKFKVISQHNPTVWNKLKELGFSLDDQTKEVIFNGVIDLTDRHAPGSTFESRTQIYKLDANGNINYNKPVGKSQAKTGKVQKSNVSNSTSRLLLVK

SEQ ID NO: 427 - protein, 363 aa, Bacillus sp.
MKKYKKLLMVAPLACMLGTGVVALPTASHADAAPVAQVNDVYNQGSTYSKEKMTELLYMRLARGIEASPELRQKFKIADDEGVQRENPANSFTDPNGNTTNYPAIDYGLQDQLSKVTIASTGTNITVNPTTVTEVEAGKIELLSYRNDTPLTQKQFTTEKQMKRVDTVTATNQYGFKLGFESTTEFKVDALVASATQSFKASAEFNFAHTDTNTVTNEETVIFKAQEVLAAAGGTTNYFTRVGKAKFSGSFQTDAALAELKLKLPIVKKNGNGRDVVHTEEVTLTAEDIYTLFKNVPYIPLPAYLGFDDNGKKVLVKNVTFDYTGEMGYSTAAQAEFIPFDQNQPKQTMSYENYETKTQDKSL

SEQ ID NO: 428 - protein, 332 aa, Artificial Sequence
  synthetic
MAPVAQVNDVYNQGSTYSKEKMTELLYMRLARGIEASPELRQKFKIADDEGVQRENPANSFTDPNGNTTNYPAIDYGLQDQLSKVTIASTGTNITVNPTTVTEVEAGKIELLSYRNDTPLTQKQFTTEKQMKRVDTVTATNQYGFKLGFESTTEFKVDALVASATQSFKASAEFNFAHTDTNTVTNEETVIFKAQEVLAAAGGTTNYFTRVGKAKFSGSFQTDAALAELKLKLPIVKKNGNGRDVVHTEEVTLTAEDIYTLFKNVPYIPLPAYLGFDDNGKKVLVKNVTFDYTGEMGYSTAAQAEFIPFDQNQPKQTMSYENYETKTQDKSL

SEQ ID NO: 429 - protein, 430 aa, Unknown
  Unknown organism from environmental sample
LIHADTWNNRIKSISEAAAKKIPYVGAIVSFAIGQLWPTDKADIFSLIKDQVKGLVDQAILNKEMEERKHEIEGLKDTMNQYVDAGNHEKGGFMTSMLTQLNIMHHKLTESTNSIHLIPLTITIANIHLTLLRERLSHGKEIYTEDNTTVWQKDLTKRYQDYHKFFLEIYPKWKTWRESKIEIKWYTDKNPTTVPPFFYWAAHGYAKDTFAEEKPIHYRDDFNSIETTFQGVCQAIKESWMNDAIAKIAASIATTFTLHRYIPGREDEPAIVDPNLETIWMGPYSLSISGNDSKVSYAVNVEDQPGELKQVYIREYNSIDGMQLIYTDHSGNFVGNPKGGEPHYLPATQDKYVTGMKMRFSSGIICRMEVIFSDGSSSGMLGNRKNWSGTDVDAVVESNYKLVCGAYKTGSGPSGTTGISVIKLGFKYSN

SEQ ID NO: 430 - protein, 430 aa, Artificial Sequence
  synthetic
MIHADTWNNRIKSISEAAAKKIPYVGAIVSFAIGQLWPTDKADIFSLIKDQVKGLVDQAILNKEMEERKHEIEGLKDTMNQYVDAGNHEKGGFMTSMLTQLNIMHHKLTESTNSIHLIPLTITIANIHLTLLRERLSHGKEIYTEDNTTVWQKDLTKRYQDYHKFFLEIYPKWKTWRESKIEIKWYTDKNPTTVPPFFYWAAHGYAKDTFAEEKPIHYRDDFNSIETTFQGVCQAIKESWMNDAIAKIAASIATTFTLHRYIPGREDEPAIVDPNLETIWMGPYSLSISGNDSKVSYAVNVEDQPGELKQVYIREYNSIDGMQLIYTDHSGNFVGNPKGGEPHYLPATQDKYVTGMKMRFSSGIICRMEVIFSDGSSSGMLGNRKNWSGTDVDAVVESNYKLVCGAYKTGSGPSGTTGISVIKLGFKYSN
